United States Patent Application Publication US 2026/0347883 A1, published November 5, 2026 (application 19/107,769).

The application's sequence listing, which the Patent Office published only in electronic form, follows.

SEQUENCE LISTING (29012 sequences)

SEQ ID NO: 1 - RNA, 20 nt, synthetic construct
  source 1..20: mol_type = other RNA
atcgagacatgtaagcagca

SEQ ID NO: 2 - RNA, 20 nt, synthetic construct
  source 1..20: mol_type = other RNA
ctccatgatgctgcttacat

SEQ ID NO: 3 - RNA, 20 nt, synthetic construct
  source 1..20: mol_type = other RNA
aaaaagcaagcaagcagaat

SEQ ID NO: 4 - RNA, 20 nt, synthetic construct
  source 1..20: mol_type = other RNA
aaaagcaagcaagcagaatt

SEQ ID NO: 5 - RNA, 20 nt, synthetic construct
  source 1..20: mol_type = other RNA
aaacatggagacagcactca

SEQ ID NO: 6 - RNA, 20 nt, synthetic construct
  source 1..20: mol_type = other RNA
aaagaagatcatgtccatgt

SEQ ID NO: 7 - RNA, 20 nt, synthetic construct
  source 1..20: mol_type = other RNA
aaagcaagcaagcagaattt

SEQ ID NO: 8 - RNA, 20 nt, synthetic construct
  source 1..20: mol_type = other RNA
aaagtgtaagtgtataagca

SEQ ID NO: 9 - RNA, 20 nt, synthetic construct
  source 1..20: mol_type = other RNA
aaattctgcttgcttgcttt

SEQ ID NO: 10 - RNA, 20 nt, synthetic construct
  source 1..20: mol_type = other RNA
aacatggacatgatcttctt

SEQ ID NO: 11 - RNA, 20 nt, synthetic construct
  source 1..20: mol_type = other RNA
aacatggagacagcactcaa

SEQ ID NO: 12 - RNA, 20 nt, synthetic construct
  source 1..20: mol_type = other RNA
aacattattataaccctaca

SEQ ID NO: 13 - RNA, 20 nt, synthetic construct
  source 1..20: mol_type = other RNA
aaccctacattttgtgcata

SEQ ID NO: 14 - RNA, 20 nt, synthetic construct
  source 1..20: mol_type = other RNA
aacctgctcagatacatcaa

SEQ ID NO: 15 - RNA, 20 nt, synthetic construct
  source 1..20: mol_type = other RNA
aagaagatcatgtccatgtt

SEQ ID NO: 16 - RNA, 20 nt, synthetic construct
  source 1..20: mol_type = other RNA
aagatcatgtccatgttaac

SEQ ID NO: 17 - RNA, 20 nt, synthetic construct
  source 1..20: mol_type = other RNA
aagatgccgcatttggattg

SEQ ID NO: 18 - RNA, 20 nt, synthetic construct
  source 1..20: mol_type = other RNA
aagcaagcaagcagaatttg

SEQ ID NO: 19 - RNA, 20 nt, synthetic construct
  source 1..20: mol_type = other RNA
aagcaagcagaatttggaat

SEQ ID NO: 20 - RNA, 20 nt, synthetic construct
  source 1..20: mol_type = other RNA
aagcagaatttggaattcat

SEQ ID NO: 21 - RNA, 20 nt, synthetic construct
  source 1..20: mol_type = other RNA
aagtgtaagtgtataagcat

SEQ ID NO: 22 - RNA, 20 nt, synthetic construct
  source 1..20: mol_type = other RNA
aagtgtataagcatatcaat

SEQ ID NO: 23 - RNA, 20 nt, synthetic construct
  source 1..20: mol_type = other RNA
aataatgttaacatggacat

SEQ ID NO: 24 - RNA, 20 nt, synthetic construct
  source 1..20: mol_type = other RNA
aatattaaaaagcaagcaag

SEQ ID NO: 25 - RNA, 20 nt, synthetic construct
  source 1..20: mol_type = other RNA
aatgtagggttataataatg

SEQ ID NO: 26 - RNA, 20 nt, synthetic construct
  source 1..20: mol_type = other RNA
aatgttaacatggacatgat

SEQ ID NO: 27 - RNA, 20 nt, synthetic construct
  source 1..20: mol_type = other RNA
aattcatccaatccaaatgc

SEQ ID NO: 28 - RNA, 20 nt, synthetic construct
  source 1..20: mol_type = other RNA
aattccaaattctgcttgct

SEQ ID NO: 29 - RNA, 20 nt, synthetic construct
  source 1..20: mol_type = other RNA
aattctactttgagtgctgt

SEQ ID NO: 30 - RNA, 20 nt, synthetic construct
  source 1..20: mol_type = other RNA
aattctgcttgcttgctttt

SEQ ID NO: 31 - RNA, 20 nt, synthetic construct
  source 1..20: mol_type = other RNA
aatttggaattcatccaatc

SEQ ID NO: 32 - RNA, 20 nt, synthetic construct
  source 1..20: mol_type = other RNA
acaaaatgtagggttataat

SEQ ID NO: 33 - RNA, 20 nt, synthetic construct
  source 1..20: mol_type = other RNA
acacttacactttatgcaca

SEQ ID NO: 34 - RNA, 20 nt, synthetic construct
  source 1..20: mol_type = other RNA
acactttatgcacaaaatgt

SEQ ID NO: 35 - RNA, 20 nt, synthetic construct
  source 1..20: mol_type = other RNA
acagcactcaaagtagaatt

SEQ ID NO: 36 - RNA, 20 nt, synthetic construct
  source 1..20: mol_type = other RNA
acatcaaacatggagacagc

SEQ ID NO: 37 - RNA, 20 nt, synthetic construct
  source 1..20: mol_type = other RNA
acatggacatgatcttcttt

SEQ ID NO: 38 - RNA, 20 nt, synthetic construct
  source 1..20: mol_type = other RNA
acatggagacagcactcaaa

SEQ ID NO: 39 - RNA, 20 nt, synthetic construct
  source 1..20: mol_type = other RNA
acattattataaccctacat

SEQ ID NO: 40 - RNA, 20 nt, synthetic construct
  source 1..20: mol_type = other RNA
acattttgtgcataaagtgt

SEQ ID NO: 41 - RNA, 20 nt, synthetic construct
  source 1..20: mol_type = other RNA
accctacattttgtgcataa

SEQ ID NO: 42 - RNA, 20 nt, synthetic construct
  source 1..20: mol_type = other RNA
acctgctcagatacatcaaa

SEQ ID NO: 43 - RNA, 20 nt, synthetic construct
  source 1..20: mol_type = other RNA
acctgtggagcaacctgctc

SEQ ID NO: 44 - RNA, 20 nt, synthetic construct
  source 1..20: mol_type = other RNA
acttacactttatgcacaaa

SEQ ID NO: 45 - RNA, 20 nt, synthetic construct
  source 1..20: mol_type = other RNA
actttatgcacaaaatgtag

SEQ ID NO: 46 - RNA, 20 nt, synthetic construct
  source 1..20: mol_type = other RNA
actttgagtgctgtctccat

SEQ ID NO: 47 - RNA, 20 nt, synthetic construct
  source 1..20: mol_type = other RNA
agaagatcatgtccatgtta

SEQ ID NO: 48 - RNA, 20 nt, synthetic construct
  source 1..20: mol_type = other RNA
agaatttggaattcatccaa

SEQ ID NO: 49 - RNA, 20 nt, synthetic construct
  source 1..20: mol_type = other RNA
agacagcactcaaagtagaa

SEQ ID NO: 50 - RNA, 20 nt, synthetic construct
  source 1..20: mol_type = other RNA
agagctacctgtggagcaac

SEQ ID NO: 51 - RNA, 20 nt, synthetic construct
  source 1..20: mol_type = other RNA
agatacatcaaacatggaga

SEQ ID NO: 52 - RNA, 20 nt, synthetic construct
  source 1..20: mol_type = other RNA
agatcatgtccatgttaaca

SEQ ID NO: 53 - RNA, 20 nt, synthetic construct
  source 1..20: mol_type = other RNA
agatgccgcatttggattgg

SEQ ID NO: 54 - RNA, 20 nt, synthetic construct
  source 1..20: mol_type = other RNA
agcaacctgctcagatacat

SEQ ID NO: 55 - RNA, 20 nt, synthetic construct
  source 1..20: mol_type = other RNA
agcaagcaagcagaatttgg

SEQ ID NO: 56 - RNA, 20 nt, synthetic construct
  source 1..20: mol_type = other RNA
agcaagcagaatttggaatt

SEQ ID NO: 57 - RNA, 20 nt, synthetic construct
  source 1..20: mol_type = other RNA
agcactcaaagtagaattat

SEQ ID NO: 58 - RNA, 20 nt, synthetic construct
  source 1..20: mol_type = other RNA
agcagaatttggaattcatc

SEQ ID NO: 59 - RNA, 20 nt, synthetic construct
  source 1..20: mol_type = other RNA
agctacctgtggagcaacct

SEQ ID NO: 60 - RNA, 20 nt, synthetic construct
  source 1..20: mol_type = other RNA
agggttataataatgttaac

SEQ ID NO: 61 - RNA, 20 nt, synthetic construct
  source 1..20: mol_type = other RNA
agtgctgtctccatgtttga

SEQ ID NO: 62 - RNA, 20 nt, synthetic construct
  source 1..20: mol_type = other RNA
agtgtaagtgtataagcata

SEQ ID NO: 63 - RNA, 20 nt, synthetic construct
  source 1..20: mol_type = other RNA
agtgtataagcatatcaata

SEQ ID NO: 64 - RNA, 20 nt, synthetic construct
  source 1..20: mol_type = other RNA
ataaagaagatcatgtccat

SEQ ID NO: 65 - RNA, 20 nt, synthetic construct
  source 1..20: mol_type = other RNA
ataaagtgtaagtgtataag

SEQ ID NO: 66 - RNA, 20 nt, synthetic construct
  source 1..20: mol_type = other RNA
ataaccctacattttgtgca

SEQ ID NO: 67 - RNA, 20 nt, synthetic construct
  source 1..20: mol_type = other RNA
ataataatgttaacatggac

SEQ ID NO: 68 - RNA, 20 nt, synthetic construct
  source 1..20: mol_type = other RNA
ataatgttaacatggacatg

SEQ ID NO: 69 - RNA, 20 nt, synthetic construct
  source 1..20: mol_type = other RNA
ataattctactttgagtgct

SEQ ID NO: 70 - RNA, 20 nt, synthetic construct
  source 1..20: mol_type = other RNA
atacacttacactttatgca

SEQ ID NO: 71 - RNA, 20 nt, synthetic construct
  source 1..20: mol_type = other RNA
atacatcaaacatggagaca

SEQ ID NO: 72 - RNA, 20 nt, synthetic construct
  source 1..20: mol_type = other RNA
atatgcttatacacttacac

SEQ ID NO: 73 - RNA, 20 nt, synthetic construct
  source 1..20: mol_type = other RNA
atattaaaaagcaagcaagc

SEQ ID NO: 74 - RNA, 20 nt, synthetic construct
  source 1..20: mol_type = other RNA
atattgatatgcttatacac

SEQ ID NO: 75 - RNA, 20 nt, synthetic construct
  source 1..20: mol_type = other RNA
atcaaacatggagacagcac

SEQ ID NO: 76 - RNA, 20 nt, synthetic construct
  source 1..20: mol_type = other RNA
atcaatattaaaaagcaagc

SEQ ID NO: 77 - RNA, 20 nt, synthetic construct
  source 1..20: mol_type = other RNA
atcatgtccatgttaacatt

SEQ ID NO: 78 - RNA, 20 nt, synthetic construct
  source 1..20: mol_type = other RNA
atccaatccaaatgcggcat

SEQ ID NO: 79 - RNA, 20 nt, synthetic construct
  source 1..20: mol_type = other RNA
atctgagcaggttgctccac

SEQ ID NO: 80 - RNA, 20 nt, synthetic construct
  source 1..20: mol_type = other RNA
atgaattccaaattctgctt

SEQ ID NO: 81 - RNA, 20 nt, synthetic construct
  source 1..20: mol_type = other RNA
atgcacaaaatgtagggtta

SEQ ID NO: 82 - RNA, 20 nt, synthetic construct
  source 1..20: mol_type = other RNA
atgccgcatttggattggat

SEQ ID NO: 83 - RNA, 20 nt, synthetic construct
  source 1..20: mol_type = other RNA
atgcttatacacttacactt

SEQ ID NO: 84 - RNA, 20 nt, synthetic construct
  source 1..20: mol_type = other RNA
atggacatgatcttctttat

SEQ ID NO: 85 - RNA, 20 nt, synthetic construct
  source 1..20: mol_type = other RNA
atggagacagcactcaaagt

SEQ ID NO: 86 - RNA, 20 nt, synthetic construct
  source 1..20: mol_type = other RNA
atgtagggttataataatgt

SEQ ID NO: 87 - RNA, 20 nt, synthetic construct
  source 1..20: mol_type = other RNA
atgtatctgagcaggttgct

SEQ ID NO: 88 - RNA, 20 nt, synthetic construct
  source 1..20: mol_type = other RNA
atgtccatgttaacattatt

SEQ ID NO: 89 - RNA, 20 nt, synthetic construct
  source 1..20: mol_type = other RNA
atgttaacatggacatgatc

SEQ ID NO: 90 - RNA, 20 nt, synthetic construct
  source 1..20: mol_type = other RNA
atgtttgatgtatctgagca

SEQ ID NO: 91 - RNA, 20 nt, synthetic construct
  source 1..20: mol_type = other RNA
attaaaaagcaagcaagcag

SEQ ID NO: 92 - RNA, 20 nt, synthetic construct
  source 1..20: mol_type = other RNA
attataaagaagatcatgtc

SEQ ID NO: 93 - RNA, 20 nt, synthetic construct
  source 1..20: mol_type = other RNA
attataaccctacattttgt

SEQ ID NO: 94 - RNA, 20 nt, synthetic construct
  source 1..20: mol_type = other RNA
attcatccaatccaaatgcg

SEQ ID NO: 95 - RNA, 20 nt, synthetic construct
  source 1..20: mol_type = other RNA
attccaaattctgcttgctt

SEQ ID NO: 96 - RNA, 20 nt, synthetic construct
  source 1..20: mol_type = other RNA
attctactttgagtgctgtc

SEQ ID NO: 97 - RNA, 20 nt, synthetic construct
  source 1..20: mol_type = other RNA
attctgcttgcttgcttttt

SEQ ID NO: 98 - RNA, 20 nt, synthetic construct
  source 1..20: mol_type = other RNA
attgatatgcttatacactt

SEQ ID NO: 99 - RNA, 20 nt, synthetic construct
  source 1..20: mol_type = other RNA
attggatgaattccaaattc

SEQ ID NO: 100 - RNA, 20 nt, synthetic construct
  source 1..20: mol_type = other RNA
atttggaattcatccaatcc

SEQ ID NO: 101 - RNA, 20 nt, synthetic construct
  source 1..20: mol_type = other RNA
atttggattggatgaattcc

SEQ ID NO: 102 - RNA, 20 nt, synthetic construct
  source 1..20: mol_type = other RNA
attttgtgcataaagtgtaa

SEQ ID NO: 103 - RNA, 20 nt, synthetic construct
  source 1..20: mol_type = other RNA
caaaatgtagggttataata

SEQ ID NO: 104 - RNA, 20 nt, synthetic construct
  source 1..20: mol_type = other RNA
caaacatggagacagcactc

SEQ ID NO: 105 - RNA, 20 nt, synthetic construct
  source 1..20: mol_type = other RNA
caaattctgcttgcttgctt

SEQ ID NO: 106 - RNA, 20 nt, synthetic construct
  source 1..20: mol_type = other RNA
caacctgctcagatacatca

SEQ ID NO: 107 - RNA, 20 nt, synthetic construct
  source 1..20: mol_type = other RNA
caagcaagcagaatttggaa

SEQ ID NO: 108 - RNA, 20 nt, synthetic construct
  source 1..20: mol_type = other RNA
caagcagaatttggaattca

SEQ ID NO: 109 - RNA, 20 nt, synthetic construct
  source 1..20: mol_type = other RNA
caatattaaaaagcaagcaa

SEQ ID NO: 110 - RNA, 20 nt, synthetic construct
  source 1..20: mol_type = other RNA
cacaaaatgtagggttataa

SEQ ID NO: 111 - RNA, 20 nt, synthetic construct
  source 1..20: mol_type = other RNA
cactcaaagtagaattataa

SEQ ID NO: 112 - RNA, 20 nt, synthetic construct
  source 1..20: mol_type = other RNA
cacttacactttatgcacaa

SEQ ID NO: 113 - RNA, 20 nt, synthetic construct
  source 1..20: mol_type = other RNA
cactttatgcacaaaatgta

SEQ ID NO: 114 - RNA, 20 nt, synthetic construct
  source 1..20: mol_type = other RNA
cagaatttggaattcatcca

SEQ ID NO: 115 - RNA, 20 nt, synthetic construct
  source 1..20: mol_type = other RNA
cagatacatcaaacatggag

SEQ ID NO: 116 - RNA, 20 nt, synthetic construct
  source 1..20: mol_type = other RNA
cagcactcaaagtagaatta

SEQ ID NO: 117 - RNA, 20 nt, synthetic construct
  source 1..20: mol_type = other RNA
cataaagtgtaagtgtataa

SEQ ID NO: 118 - RNA, 20 nt, synthetic construct
  source 1..20: mol_type = other RNA
catcaaacatggagacagca

SEQ ID NO: 119 - RNA, 20 nt, synthetic construct
  source 1..20: mol_type = other RNA
catccaatccaaatgcggca

SEQ ID NO: 120 - RNA, 20 nt, synthetic construct
  source 1..20: mol_type = other RNA
catgatcttctttataattc

SEQ ID NO: 121 - RNA, 20 nt, synthetic construct
  source 1..20: mol_type = other RNA
catggacatgatcttcttta

SEQ ID NO: 122 - RNA, 20 nt, synthetic construct
  source 1..20: mol_type = other RNA
catggagacagcactcaaag

SEQ ID NO: 123 - RNA, 20 nt, synthetic construct
  source 1..20: mol_type = other RNA
catgtccatgttaacattat

SEQ ID NO: 124 - RNA, 20 nt, synthetic construct
  source 1..20: mol_type = other RNA
catgtttgatgtatctgagc

SEQ ID NO: 125 - RNA, 20 nt, synthetic construct
  source 1..20: mol_type = other RNA
cattattataaccctacatt

SEQ ID NO: 126 - RNA, 20 nt, synthetic construct
  source 1..20: mol_type = other RNA
catttggattggatgaattc

SEQ ID NO: 127 - RNA, 20 nt, synthetic construct
  source 1..20: mol_type = other RNA
cattttgtgcataaagtgta

SEQ ID NO: 128 - RNA, 20 nt, synthetic construct
  source 1..20: mol_type = other RNA
ccaaattctgcttgcttgct

SEQ ID NO: 129 - RNA, 20 nt, synthetic construct
  source 1..20: mol_type = other RNA
ccatgtttgatgtatctgag

SEQ ID NO: 130 - RNA, 20 nt, synthetic construct
  source 1..20: mol_type = other RNA
ccctacattttgtgcataaa

SEQ ID NO: 131 - RNA, 20 nt, synthetic construct
  source 1..20: mol_type = other RNA
ccgcatttggattggatgaa

SEQ ID NO: 132 - RNA, 20 nt, synthetic construct
  source 1..20: mol_type = other RNA
cctacattttgtgcataaag

SEQ ID NO: 133 - RNA, 20 nt, synthetic construct
  source 1..20: mol_type = other RNA
cctgctcagatacatcaaac

SEQ ID NO: 134 - RNA, 20 nt, synthetic construct
  source 1..20: mol_type = other RNA
cctgtggagcaacctgctca

SEQ ID NO: 135 - RNA, 20 nt, synthetic construct
  source 1..20: mol_type = other RNA
cgcatttggattggatgaat

SEQ ID NO: 136 - RNA, 20 nt, synthetic construct
  source 1..20: mol_type = other RNA
ctacattttgtgcataaagt

SEQ ID NO: 137 - RNA, 20 nt, synthetic construct
  source 1..20: mol_type = other RNA
ctacctgtggagcaacctgc

SEQ ID NO: 138 - RNA, 20 nt, synthetic construct
  source 1..20: mol_type = other RNA
ctactttgagtgctgtctcc

SEQ ID NO: 139 - RNA, 20 nt, synthetic construct
  source 1..20: mol_type = other RNA
ctagagctacctgtggagca

SEQ ID NO: 140 - RNA, 20 nt, synthetic construct
  source 1..20: mol_type = other RNA
ctcaaagtagaattataaag

SEQ ID NO: 141 - RNA, 20 nt, synthetic construct
  source 1..20: mol_type = other RNA
ctcagatacatcaaacatgg

SEQ ID NO: 142 - RNA, 20 nt, synthetic construct
  source 1..20: mol_type = other RNA
ctccatgtttgatgtatctg

SEQ ID NO: 143 - RNA, 20 nt, synthetic construct
  source 1..20: mol_type = other RNA
ctgagcaggttgctccacag

SEQ ID NO: 144 - RNA, 20 nt, synthetic construct
  source 1..20: mol_type = other RNA
ctgctcagatacatcaaaca

SEQ ID NO: 145 - RNA, 20 nt, synthetic construct
  source 1..20: mol_type = other RNA
ctgcttgcttgctttttaat

SEQ ID NO: 146 - RNA, 20 nt, synthetic construct
  source 1..20: mol_type = other RNA
ctgtctccatgtttgatgta

SEQ ID NO: 147 - RNA, 20 nt, synthetic construct
  source 1..20: mol_type = other RNA
ctgtggagcaacctgctcag

SEQ ID NO: 148 - RNA, 20 nt, synthetic construct
  source 1..20: mol_type = other RNA
cttacactttatgcacaaaa

SEQ ID NO: 149 - RNA, 20 nt, synthetic construct
  source 1..20: mol_type = other RNA
cttatacacttacactttat

SEQ ID NO: 150 - RNA, 20 nt, synthetic construct
  source 1..20: mol_type = other RNA
cttgcttgctttttaatatt

SEQ ID NO: 151 - RNA, 20 nt, synthetic construct
  source 1..20: mol_type = other RNA
ctttataattctactttgag

SEQ ID NO: 152 - RNA, 20 nt, synthetic construct
  source 1..20: mol_type = other RNA
ctttatgcacaaaatgtagg

SEQ ID NO: 153 - RNA, 20 nt, synthetic construct
  source 1..20: mol_type = other RNA
ctttgagtgctgtctccatg

SEQ ID NO: 154 - RNA, 20 nt, synthetic construct
  source 1..20: mol_type = other RNA
gaagatcatgtccatgttaa

SEQ ID NO: 155 - RNA, 20 nt, synthetic construct
  source 1..20: mol_type = other RNA
gaagatgccgcatttggatt

SEQ ID NO: 156 - RNA, 20 nt, synthetic construct
  source 1..20: mol_type = other RNA
gaattataaagaagatcatg

SEQ ID NO: 157 - RNA, 20 nt, synthetic construct
  source 1..20: mol_type = other RNA
gaattcatccaatccaaatg

SEQ ID NO: 158 - RNA, 20 nt, synthetic construct
  source 1..20: mol_type = other RNA
gaattccaaattctgcttgc

SEQ ID NO: 159 - RNA, 20 nt, synthetic construct
  source 1..20: mol_type = other RNA
gaatttggaattcatccaat

SEQ ID NO: 160 - RNA, 20 nt, synthetic construct
  source 1..20: mol_type = other RNA
gacagcactcaaagtagaat

SEQ ID NO: 161 - RNA, 20 nt, synthetic construct
  source 1..20: mol_type = other RNA
gacatgatcttctttataat

SEQ ID NO: 162 - RNA, 20 nt, synthetic construct
  source 1..20: mol_type = other RNA
gagacagcactcaaagtaga

SEQ ID NO: 163 - RNA, 20 nt, synthetic construct
  source 1..20: mol_type = other RNA
gagcaacctgctcagataca

SEQ ID NO: 164 - RNA, 20 nt, synthetic construct
  source 1..20: mol_type = other RNA
gagcaggttgctccacaggt

SEQ ID NO: 165 - RNA, 20 nt, synthetic construct
  source 1..20: mol_type = other RNA
gagctacctgtggagcaacc

SEQ ID NO: 166 - RNA, 20 nt, synthetic construct
  source 1..20: mol_type = other RNA
gagtgctgtctccatgtttg

SEQ ID NO: 167 - RNA, 20 nt, synthetic construct
  source 1..20: mol_type = other RNA
gatacatcaaacatggagac

SEQ ID NO: 168 - RNA, 20 nt, synthetic construct
  source 1..20: mol_type = other RNA
gatatgcttatacacttaca

SEQ ID NO: 169 - RNA, 20 nt, synthetic construct
  source 1..20: mol_type = other RNA
gatcatgtccatgttaacat

SEQ ID NO: 170 - RNA, 20 nt, synthetic construct
  source 1..20: mol_type = other RNA
gatcttctttataattctac

SEQ ID NO: 171 - RNA, 20 nt, synthetic construct
  source 1..20: mol_type = other RNA
gatgaattccaaattctgct

SEQ ID NO: 172 - RNA, 20 nt, synthetic construct
  source 1..20: mol_type = other RNA
gatgccgcatttggattgga

SEQ ID NO: 173 - RNA, 20 nt, synthetic construct
  source 1..20: mol_type = other RNA
gatgtatctgagcaggttgc

SEQ ID NO: 174 - RNA, 20 nt, synthetic construct
  source 1..20: mol_type = other RNA
gattggatgaattccaaatt

SEQ ID NO: 175 - RNA, 20 nt, synthetic construct
  source 1..20: mol_type = other RNA
gcaacctgctcagatacatc

SEQ ID NO: 176 - RNA, 20 nt, synthetic construct
  source 1..20: mol_type = other RNA
gcaagcaagcagaatttgga

SEQ ID NO: 177 - RNA, 20 nt, synthetic construct
  source 1..20: mol_type = other RNA
gcaagcagaatttggaattc

SEQ ID NO: 178 - RNA, 20 nt, synthetic construct
  source 1..20: mol_type = other RNA
gcacaaaatgtagggttata

SEQ ID NO: 179 - RNA, 20 nt, synthetic construct
  source 1..20: mol_type = other RNA
gcactcaaagtagaattata

SEQ ID NO: 180 - RNA, 20 nt, synthetic construct
  source 1..20: mol_type = other RNA
gcagaatttggaattcatcc

SEQ ID NO: 181 - RNA, 20 nt, synthetic construct
  source 1..20: mol_type = other RNA
gcataaagtgtaagtgtata

SEQ ID NO: 182 - RNA, 20 nt, synthetic construct
  source 1..20: mol_type = other RNA
gcatatcaatattaaaaagc

SEQ ID NO: 183 - RNA, 20 nt, synthetic construct
  source 1..20: mol_type = other RNA
gcatttggattggatgaatt

SEQ ID NO: 184 - RNA, 20 nt, synthetic construct
  source 1..20: mol_type = other RNA
gccgcatttggattggatga

SEQ ID NO: 185 - RNA, 20 nt, synthetic construct
  source 1..20: mol_type = other RNA
gctacctgtggagcaacctg

SEQ ID NO: 186 - RNA, 20 nt, synthetic construct
  source 1..20: mol_type = other RNA
gctcagatacatcaaacatg

SEQ ID NO: 187 - RNA, 20 nt, synthetic construct
  source 1..20: mol_type = other RNA
gctgtctccatgtttgatgt

SEQ ID NO: 188 - RNA, 20 nt, synthetic construct
  source 1..20: mol_type = other RNA
gcttatacacttacacttta

SEQ ID NO: 189 - RNA, 20 nt, synthetic construct
  source 1..20: mol_type = other RNA
gcttgcttgctttttaatat

SEQ ID NO: 190 - RNA, 20 nt, synthetic construct
  source 1..20: mol_type = other RNA
gcttgctttttaatattgat

SEQ ID NO: 191 - RNA, 20 nt, synthetic construct
  source 1..20: mol_type = other RNA
gctttttaatattgatatgc

SEQ ID NO: 192 - RNA, 20 nt, synthetic construct
  source 1..20: mol_type = other RNA
ggaattcatccaatccaaat

SEQ ID NO: 193 - RNA, 20 nt, synthetic construct
  source 1..20: mol_type = other RNA
ggacatgatcttctttataa

SEQ ID NO: 194 - RNA, 20 nt, synthetic construct
  source 1..20: mol_type = other RNA
ggagacagcactcaaagtag

SEQ ID NO: 195 - RNA, 20 nt, synthetic construct
  source 1..20: mol_type = other RNA
ggagcaacctgctcagatac

SEQ ID NO: 196 - RNA, 20 nt, synthetic construct
  source 1..20: mol_type = other RNA
ggatgaattccaaattctgc

SEQ ID NO: 197 - RNA, 20 nt, synthetic construct
  source 1..20: mol_type = other RNA
ggattggatgaattccaaat

SEQ ID NO: 198 - RNA, 20 nt, synthetic construct
  source 1..20: mol_type = other RNA
gggttataataatgttaaca

SEQ ID NO: 199 - RNA, 20 nt, synthetic construct
  source 1..20: mol_type = other RNA
gtaagtgtataagcatatca

SEQ ID NO: 200 - RNA, 20 nt, synthetic construct
  source 1..20: mol_type = other RNA
gtagaattataaagaagatc

SEQ ID NO: 201 - RNA, 20 nt, synthetic construct
  source 1..20: mol_type = other RNA
gtagggttataataatgtta

SEQ ID NO: 202 - RNA, 20 nt, synthetic construct
  source 1..20: mol_type = other RNA
gtatctgagcaggttgctcc

SEQ ID NO: 203 - RNA, 20 nt, synthetic construct
  source 1..20: mol_type = other RNA
gtccatgttaacattattat

SEQ ID NO: 204 - RNA, 20 nt, synthetic construct
  source 1..20: mol_type = other RNA
gtctccatgtttgatgtatc

SEQ ID NO: 205 - RNA, 20 nt, synthetic construct
  source 1..20: mol_type = other RNA
gtgcataaagtgtaagtgta

SEQ ID NO: 206 - RNA, 20 nt, synthetic construct
  source 1..20: mol_type = other RNA
gtgctgtctccatgtttgat

SEQ ID NO: 207 - RNA, 20 nt, synthetic construct
  source 1..20: mol_type = other RNA
gtggagcaacctgctcagat

SEQ ID NO: 208 - RNA, 20 nt, synthetic construct
  source 1..20: mol_type = other RNA
gtgtaagtgtataagcatat

SEQ ID NO: 209 - RNA, 20 nt, synthetic construct
  source 1..20: mol_type = other RNA
gtgtataagcatatcaatat

SEQ ID NO: 210 - RNA, 20 nt, synthetic construct
  source 1..20: mol_type = other RNA
gttaacatggacatgatctt

SEQ ID NO: 211 - RNA, 20 nt, synthetic construct
  source 1..20: mol_type = other RNA
gttaacattattataaccct

SEQ ID NO: 212 - RNA, 20 nt, synthetic construct
  source 1..20: mol_type = other RNA
gtttgaagatgccgcatttg

SEQ ID NO: 213 - RNA, 20 nt, synthetic construct
  source 1..20: mol_type = other RNA
gtttgatgtatctgagcagg

SEQ ID NO: 214 - RNA, 20 nt, synthetic construct
  source 1..20: mol_type = other RNA
taaaaagcaagcaagcagaa

SEQ ID NO: 215 - RNA, 20 nt, synthetic construct
  source 1..20: mol_type = other RNA
taaagaagatcatgtccatg

SEQ ID NO: 216 - RNA, 20 nt, synthetic construct
  source 1..20: mol_type = other RNA
taaagtgtaagtgtataagc

SEQ ID NO: 217 - RNA, 20 nt, synthetic construct
  source 1..20: mol_type = other RNA
taacatggacatgatcttct

SEQ ID NO: 218 - RNA, 20 nt, synthetic construct
  source 1..20: mol_type = other RNA
taacattattataaccctac

SEQ ID NO: 219 - RNA, 20 nt, synthetic construct
  source 1..20: mol_type = other RNA
taaccctacattttgtgcat

SEQ ID NO: 220 - RNA, 20 nt, synthetic construct
  source 1..20: mol_type = other RNA
taagtgtataagcatatcaa

SEQ ID NO: 221 - RNA, 20 nt, synthetic construct
  source 1..20: mol_type = other RNA
taataatgttaacatggaca

SEQ ID NO: 222 - RNA, 20 nt, synthetic construct
  source 1..20: mol_type = other RNA
taatgttaacatggacatga

SEQ ID NO: 223 - RNA, 20 nt, synthetic construct
  source 1..20: mol_type = other RNA
taattctactttgagtgctg

SEQ ID NO: 224 - RNA, 20 nt, synthetic construct
  source 1..20: mol_type = other RNA
tacacttacactttatgcac

SEQ ID NO: 225 - RNA, 20 nt, synthetic construct
  source 1..20: mol_type = other RNA
tacactttatgcacaaaatg

SEQ ID NO: 226 - RNA, 20 nt, synthetic construct
  source 1..20: mol_type = other RNA
tacatcaaacatggagacag

SEQ ID NO: 227 - RNA, 20 nt, synthetic construct
  source 1..20: mol_type = other RNA
tacattttgtgcataaagtg

SEQ ID NO: 228 - RNA, 20 nt, synthetic construct
  source 1..20: mol_type = other RNA
tacctgtggagcaacctgct

SEQ ID NO: 229 - RNA, 20 nt, synthetic construct
  source 1..20: mol_type = other RNA
tactttgagtgctgtctcca

SEQ ID NO: 230 - RNA, 20 nt, synthetic construct
  source 1..20: mol_type = other RNA
tagagctacctgtggagcaa

SEQ ID NO: 231 - RNA, 20 nt, synthetic construct
  source 1..20: mol_type = other RNA
tataaagaagatcatgtcca

SEQ ID NO: 232 - RNA, 20 nt, synthetic construct
  source 1..20: mol_type = other RNA
tataaccctacattttgtgc

SEQ ID NO: 233 - RNA, 20 nt, synthetic construct
  source 1..20: mol_type = other RNA
tataattctactttgagtgc

SEQ ID NO: 234 - RNA, 20 nt, synthetic construct
  source 1..20: mol_type = other RNA
tatacacttacactttatgc

SEQ ID NO: 235 - RNA, 20 nt, synthetic construct
  source 1..20: mol_type = other RNA
tatctgagcaggttgctcca

SEQ ID NO: 236 - RNA, 20 nt, synthetic construct
  source 1..20: mol_type = other RNA
tatgcacaaaatgtagggtt

SEQ ID NO: 237 - RNA, 20 nt, synthetic construct
  source 1..20: mol_type = other RNA
tatgcttatacacttacact

SEQ ID NO: 238 - RNA, 20 nt, synthetic construct
  source 1..20: mol_type = other RNA
tattaaaaagcaagcaagca

SEQ ID NO: 239 - RNA, 20 nt, synthetic construct
  source 1..20: mol_type = other RNA
tattataaccctacattttg

SEQ ID NO: 240 - RNA, 20 nt, synthetic construct
  source 1..20: mol_type = other RNA
tattgatatgcttatacact

SEQ ID NO: 241 - RNA, 20 nt, synthetic construct
  source 1..20: mol_type = other RNA
tcaaacatggagacagcact

SEQ ID NO: 242 - RNA, 20 nt, synthetic construct
  source 1..20: mol_type = other RNA
tcaatattaaaaagcaagca

SEQ ID NO: 243 - RNA, 20 nt, synthetic construct
  source 1..20: mol_type = other RNA
tcagatacatcaaacatgga

SEQ ID NO: 244 - RNA, 20 nt, synthetic construct
  source 1..20: mol_type = other RNA
tcatccaatccaaatgcggc

SEQ ID NO: 245 - RNA, 20 nt, synthetic construct
  source 1..20: mol_type = other RNA
tcatgtccatgttaacatta

SEQ ID NO: 246 - RNA, 20 nt, synthetic construct
  source 1..20: mol_type = other RNA
tccaaattctgcttgcttgc

SEQ ID NO: 247 - RNA, 20 nt, synthetic construct
  source 1..20: mol_type = other RNA
tccatgtttgatgtatctga

SEQ ID NO: 248 - RNA, 20 nt, synthetic construct
  source 1..20: mol_type = other RNA
tctactttgagtgctgtctc

SEQ ID NO: 249 - RNA, 20 nt, synthetic construct
  source 1..20: mol_type = other RNA
tctccatgtttgatgtatct

SEQ ID NO: 250 - RNA, 20 nt, synthetic construct
  source 1..20: mol_type = other RNA
tctgagcaggttgctccaca

SEQ ID NO: 251 - RNA, 20 nt, synthetic construct
  source 1..20: mol_type = other RNA
tctgcttgcttgctttttaa

SEQ ID NO: 252 - RNA, 20 nt, synthetic construct
  source 1..20: mol_type = other RNA
tgaagatgccgcatttggat

SEQ ID NO: 253 - RNA, 20 nt, synthetic construct
  source 1..20: mol_type = other RNA
tgaattccaaattctgcttg

SEQ ID NO: 254 - RNA, 20 nt, synthetic construct
  source 1..20: mol_type = other RNA
tgagcaggttgctccacagg

SEQ ID NO: 255 - RNA, 20 nt, synthetic construct
  source 1..20: mol_type = other RNA
tgagtgctgtctccatgttt

SEQ ID NO: 256 - RNA, 20 nt, synthetic construct
  source 1..20: mol_type = other RNA
tgatatgcttatacacttac

SEQ ID NO: 257 - RNA, 20 nt, synthetic construct
  source 1..20: mol_type = other RNA
tgatgtatctgagcaggttg

SEQ ID NO: 258 - RNA, 20 nt, synthetic construct
  source 1..20: mol_type = other RNA
tgcacaaaatgtagggttat

SEQ ID NO: 259 - RNA, 20 nt, synthetic construct
  source 1..20: mol_type = other RNA
tgcataaagtgtaagtgtat

SEQ ID NO: 260 - RNA, 20 nt, synthetic construct
  source 1..20: mol_type = other RNA
tgccgcatttggattggatg

SEQ ID NO: 261 - RNA, 20 nt, synthetic construct
  source 1..20: mol_type = other RNA
tgctcagatacatcaaacat

SEQ ID NO: 262 - RNA, 20 nt, synthetic construct
  source 1..20: mol_type = other RNA
tgctgtctccatgtttgatg

SEQ ID NO: 263 - RNA, 20 nt, synthetic construct
  source 1..20: mol_type = other RNA
tgcttatacacttacacttt

SEQ ID NO: 264 - RNA, 20 nt, synthetic construct
  source 1..20: mol_type = other RNA
tgcttgcttgctttttaata

SEQ ID NO: 265 - RNA, 20 nt, synthetic construct
  source 1..20: mol_type = other RNA
tgcttgctttttaatattga

SEQ ID NO: 266 - RNA, 20 nt, synthetic construct
  source 1..20: mol_type = other RNA
tggaattcatccaatccaaa

SEQ ID NO: 267 - RNA, 20 nt, synthetic construct
  source 1..20: mol_type = other RNA
tggacatgatcttctttata

SEQ ID NO: 268 - RNA, 20 nt, synthetic construct
  source 1..20: mol_type = other RNA
tggagacagcactcaaagta

SEQ ID NO: 269 - RNA, 20 nt, synthetic construct
  source 1..20: mol_type = other RNA
tggagcaacctgctcagata

SEQ ID NO: 270 - RNA, 20 nt, synthetic construct
  source 1..20: mol_type = other RNA
tggatgaattccaaattctg

SEQ ID NO: 271 - RNA, 20 nt, synthetic construct
  source 1..20: mol_type = other RNA
tggattggatgaattccaaa

SEQ ID NO: 272 - RNA, 20 nt, synthetic construct
  source 1..20: mol_type = other RNA
tgtaagtgtataagcatatc

SEQ ID NO: 273 - RNA, 20 nt, synthetic construct
  source 1..20: mol_type = other RNA
tgtagggttataataatgtt

SEQ ID NO: 274 - RNA, 20 nt, synthetic construct
  source 1..20: mol_type = other RNA
tgtatctgagcaggttgctc

SEQ ID NO: 275 - RNA, 20 nt, synthetic construct
  source 1..20: mol_type = other RNA
tgtccatgttaacattatta

SEQ ID NO: 276 - RNA, 20 nt, synthetic construct
  source 1..20: mol_type = other RNA
tgtctccatgtttgatgtat

SEQ ID NO: 277 - RNA, 20 nt, synthetic construct
  source 1..20: mol_type = other RNA
tgtgcataaagtgtaagtgt

SEQ ID NO: 278 - RNA, 20 nt, synthetic construct
  source 1..20: mol_type = other RNA
tgtggagcaacctgctcaga

SEQ ID NO: 279 - RNA, 20 nt, synthetic construct
  source 1..20: mol_type = other RNA
tgttaacatggacatgatct

SEQ ID NO: 280 - RNA, 20 nt, synthetic construct
  source 1..20: mol_type = other RNA
tgttaacattattataaccc

SEQ ID NO: 281 - RNA, 20 nt, synthetic construct
  source 1..20: mol_type = other RNA
tgtttgatgtatctgagcag

SEQ ID NO: 282 - RNA, 20 nt, synthetic construct
  source 1..20: mol_type = other RNA
ttaaaaagcaagcaagcaga

SEQ ID NO: 283 - RNA, 20 nt, synthetic construct
  source 1..20: mol_type = other RNA
ttaacatggacatgatcttc

SEQ ID NO: 284 - RNA, 20 nt, synthetic construct
  source 1..20: mol_type = other RNA
ttacactttatgcacaaaat

SEQ ID NO: 285 - RNA, 20 nt, synthetic construct
  source 1..20: mol_type = other RNA
ttataaagaagatcatgtcc

SEQ ID NO: 286 - RNA, 20 nt, synthetic construct
  source 1..20: mol_type = other RNA
ttataaccctacattttgtg

SEQ ID NO: 287 - RNA, 20 nt, synthetic construct
  source 1..20: mol_type = other RNA
ttataattctactttgagtg

SEQ ID NO: 288 - RNA, 20 nt, synthetic construct
  source 1..20: mol_type = other RNA
ttatacacttacactttatg

SEQ ID NO: 289 - RNA, 20 nt, synthetic construct
  source 1..20: mol_type = other RNA
ttatgcacaaaatgtagggt

SEQ ID NO: 290 - RNA, 20 nt, synthetic construct
  source 1..20: mol_type = other RNA
ttcatccaatccaaatgcgg

SEQ ID NO: 291 - RNA, 20 nt, synthetic construct
  source 1..20: mol_type = other RNA
ttccaaattctgcttgcttg

SEQ ID NO: 292 - RNA, 20 nt, synthetic construct
  source 1..20: mol_type = other RNA
ttctactttgagtgctgtct

SEQ ID NO: 293 - RNA, 20 nt, synthetic construct
  source 1..20: mol_type = other RNA
ttctgcttgcttgcttttta

SEQ ID NO: 294 - RNA, 20 nt, synthetic construct
  source 1..20: mol_type = other RNA
ttgaagatgccgcatttgga

SEQ ID NO: 295 - RNA, 20 nt, synthetic construct
  source 1..20: mol_type = other RNA
ttgagtgctgtctccatgtt

SEQ ID NO: 296 - RNA, 20 nt, synthetic construct
  source 1..20: mol_type = other RNA
ttgatatgcttatacactta

SEQ ID NO: 297 - RNA, 20 nt, synthetic construct
  source 1..20: mol_type = other RNA
ttgatgtatctgagcaggtt

SEQ ID NO: 298 - RNA, 20 nt, synthetic construct
  source 1..20: mol_type = other RNA
ttgcttgctttttaatattg

SEQ ID NO: 299 - RNA, 20 nt, synthetic construct
  source 1..20: mol_type = other RNA
ttggaattcatccaatccaa

SEQ ID NO: 300 - RNA, 20 nt, synthetic construct
  source 1..20: mol_type = other RNA
ttggatgaattccaaattct

SEQ ID NO: 301 - RNA, 20 nt, synthetic construct
  source 1..20: mol_type = other RNA
ttggattggatgaattccaa

SEQ ID NO: 302 - RNA, 20 nt, synthetic construct
  source 1..20: mol_type = other RNA
ttgtgcataaagtgtaagtg

SEQ ID NO: 303 - RNA, 20 nt, synthetic construct
  source 1..20: mol_type = other RNA
tttatgcacaaaatgtaggg

SEQ ID NO: 304 - RNA, 20 nt, synthetic construct
  source 1..20: mol_type = other RNA
tttgaagatgccgcatttgg

SEQ ID NO: 305 - RNA, 20 nt, synthetic construct
  source 1..20: mol_type = other RNA
tttgagtgctgtctccatgt

SEQ ID NO: 306 - RNA, 20 nt, synthetic construct
  source 1..20: mol_type = other RNA
tttgatgtatctgagcaggt

SEQ ID NO: 307 - RNA, 20 nt, synthetic construct
  source 1..20: mol_type = other RNA
tttggaattcatccaatcca

SEQ ID NO: 308 - RNA, 20 nt, synthetic construct
  source 1..20: mol_type = other RNA
tttggattggatgaattcca

SEQ ID NO: 309 - RNA, 20 nt, synthetic construct
  source 1..20: mol_type = other RNA
tttgtgcataaagtgtaagt

SEQ ID NO: 310 - RNA, 20 nt, synthetic construct
  source 1..20: mol_type = other RNA
ttttgtgcataaagtgtaag

SEQ ID NO: 311 - RNA, 21 nt, synthetic construct
  source 1..21: mol_type = other RNA
aaaaagcaagcaagcagaatt

SEQ ID NO: 312 - RNA, 21 nt, synthetic construct
  source 1..21: mol_type = other RNA
aaaagcaagcaagcagaattt

SEQ ID NO: 313 - RNA, 21 nt, synthetic construct
  source 1..21: mol_type = other RNA
aaacatggagacagcactcaa

SEQ ID NO: 314 - RNA, 21 nt, synthetic construct
  source 1..21: mol_type = other RNA
aaagaagatcatgtccatgtt

SEQ ID NO: 315 - RNA, 21 nt, synthetic construct
  source 1..21: mol_type = other RNA
aaagcaagcaagcagaatttg

SEQ ID NO: 316 - RNA, 21 nt, synthetic construct
  source 1..21: mol_type = other RNA
aaagtgtaagtgtataagcat

SEQ ID NO: 317 - RNA, 21 nt, synthetic construct
  source 1..21: mol_type = other RNA
aaattctgcttgcttgctttt

SEQ ID NO: 318 - RNA, 21 nt, synthetic construct
  source 1..21: mol_type = other RNA
aacatggacatgatcttcttt

SEQ ID NO: 319 - RNA, 21 nt, synthetic construct
  source 1..21: mol_type = other RNA
aacatggagacagcactcaaa

SEQ ID NO: 320 - RNA, 21 nt, synthetic construct
  source 1..21: mol_type = other RNA
aaccctacattttgtgcataa

SEQ ID NO: 321 - RNA, 21 nt, synthetic construct
  source 1..21: mol_type = other RNA
aacctgctcagatacatcaaa

SEQ ID NO: 322 - RNA, 21 nt, synthetic construct
  source 1..21: mol_type = other RNA
aagaagatcatgtccatgtta

SEQ ID NO: 323 - RNA, 21 nt, synthetic construct
  source 1..21: mol_type = other RNA
aagatcatgtccatgttaaca

SEQ ID NO: 324 - RNA, 21 nt, synthetic construct
  source 1..21: mol_type = other RNA
aagatgccgcatttggattgg

SEQ ID NO: 325 - RNA, 21 nt, synthetic construct
  source 1..21: mol_type = other RNA
aagcaagcaagcagaatttgg

SEQ ID NO: 326 - RNA, 21 nt, synthetic construct
  source 1..21: mol_type = other RNA
aagcaagcagaatttggaatt

SEQ ID NO: 327 - RNA, 21 nt, synthetic construct
  source 1..21: mol_type = other RNA
aagcagaatttggaattcatc

SEQ ID NO: 328 - RNA, 21 nt, synthetic construct
  source 1..21: mol_type = other RNA
aagtgtaagtgtataagcata

SEQ ID NO: 329 - RNA, 21 nt, synthetic construct
  source 1..21: mol_type = other RNA
aataatgttaacatggacatg

SEQ ID NO: 330 - RNA, 21 nt, synthetic construct
  source 1..21: mol_type = other RNA
aatattaaaaagcaagcaagc

SEQ ID NO: 331 - RNA, 21 nt, synthetic construct
  source 1..21: mol_type = other RNA
aatgttaacatggacatgatc

SEQ ID NO: 332 - RNA, 21 nt, synthetic construct
  source 1..21: mol_type = other RNA
aattcatccaatccaaatgcg

SEQ ID NO: 333 - RNA, 21 nt, synthetic construct
  source 1..21: mol_type = other RNA
aattccaaattctgcttgctt

SEQ ID NO: 334 - RNA, 21 nt, synthetic construct
  source 1..21: mol_type = other RNA
aattctactttgagtgctgtc

SEQ ID NO: 335 - RNA, 21 nt, synthetic construct
  source 1..21: mol_type = other RNA
aattctgcttgcttgcttttt

SEQ ID NO: 336 - RNA, 21 nt, synthetic construct
  source 1..21: mol_type = other RNA
aatttggaattcatccaatcc

SEQ ID NO: 337 - RNA, 21 nt, synthetic construct
  source 1..21: mol_type = other RNA
acacttacactttatgcacaa

SEQ ID NO: 338 - RNA, 21 nt, synthetic construct
  source 1..21: mol_type = other RNA
acactttatgcacaaaatgta

SEQ ID NO: 339 - RNA, 21 nt, synthetic construct
  source 1..21: mol_type = other RNA
acagcactcaaagtagaatta

SEQ ID NO: 340 - RNA, 21 nt, synthetic construct
  source 1..21: mol_type = other RNA
acatcaaacatggagacagca

SEQ ID NO: 341 - RNA, 21 nt, synthetic construct
  source 1..21: mol_type = other RNA
acatggacatgatcttcttta

SEQ ID NO: 342 - RNA, 21 nt, synthetic construct
  source 1..21: mol_type = other RNA
acatggagacagcactcaaag

SEQ ID NO: 343 - RNA, 21 nt, synthetic construct
  source 1..21: mol_type = other RNA
acattttgtgcataaagtgta

SEQ ID NO: 344 - RNA, 21 nt, synthetic construct
  source 1..21: mol_type = other RNA
accctacattttgtgcataaa

SEQ ID NO: 345 - RNA, 21 nt, synthetic construct
  source 1..21: mol_type = other RNA
acctgctcagatacatcaaac

SEQ ID NO: 346 - RNA, 21 nt, synthetic construct
  source 1..21: mol_type = other RNA
acctgtggagcaacctgctca

SEQ ID NO: 347 - RNA, 21 nt, synthetic construct
  source 1..21: mol_type = other RNA
acttacactttatgcacaaaa

SEQ ID NO: 348 - RNA, 21 nt, synthetic construct
  source 1..21: mol_type = other RNA
actttatgcacaaaatgtagg

SEQ ID NO: 349 - RNA, 21 nt, synthetic construct
  source 1..21: mol_type = other RNA
actttgagtgctgtctccatg

SEQ ID NO: 350 - RNA, 21 nt, synthetic construct
  source 1..21: mol_type = other RNA
agaagatcatgtccatgttaa

SEQ ID NO: 351 - RNA, 21 nt, synthetic construct
  source 1..21: mol_type = other RNA
agaatttggaattcatccaat

SEQ ID NO: 352 - RNA, 21 nt, synthetic construct
  source 1..21: mol_type = other RNA
agacagcactcaaagtagaat

SEQ ID NO: 353 - RNA, 21 nt, synthetic construct
  source 1..21: mol_type = other RNA
agagctacctgtggagcaacc

SEQ ID NO: 354 - RNA, 21 nt, synthetic construct
  source 1..21: mol_type = other RNA
agatacatcaaacatggagac

SEQ ID NO: 355 - RNA, 21 nt, synthetic construct
  source 1..21: mol_type = other RNA
agatcatgtccatgttaacat

SEQ ID NO: 356 - RNA, 21 nt, synthetic construct
  source 1..21: mol_type = other RNA
agatgccgcatttggattgga

SEQ ID NO: 357 - RNA, 21 nt, synthetic construct
  source 1..21: mol_type = other RNA
agcaacctgctcagatacatc

SEQ ID NO: 358 - RNA, 21 nt, synthetic construct
  source 1..21: mol_type = other RNA
agcaagcaagcagaatttgga

SEQ ID NO: 359 - RNA, 21 nt, synthetic construct
  source 1..21: mol_type = other RNA
agcaagcagaatttggaattc

SEQ ID NO: 360 - RNA, 21 nt, synthetic construct
  source 1..21: mol_type = other RNA
agcactcaaagtagaattata

SEQ ID NO: 361 - RNA, 21 nt, synthetic construct
  source 1..21: mol_type = other RNA
agcagaatttggaattcatcc

SEQ ID NO: 362 - RNA, 21 nt, synthetic construct
  source 1..21: mol_type = other RNA
agctacctgtggagcaacctg

SEQ ID NO: 363 - RNA, 21 nt, synthetic construct
  source 1..21: mol_type = other RNA
agtgctgtctccatgtttgat

SEQ ID NO: 364 - RNA, 21 nt, synthetic construct
  source 1..21: mol_type = other RNA
agtgtaagtgtataagcatat

SEQ ID NO: 365 - RNA, 21 nt, synthetic construct
  source 1..21: mol_type = other RNA
ataaagaagatcatgtccatg

SEQ ID NO: 366 - RNA, 21 nt, synthetic construct
  source 1..21: mol_type = other RNA
ataaagtgtaagtgtataagc

SEQ ID NO: 367 - RNA, 21 nt, synthetic construct
  source 1..21: mol_type = other RNA
ataaccctacattttgtgcat

SEQ ID NO: 368 - RNA, 21 nt, synthetic construct
  source 1..21: mol_type = other RNA
ataatgttaacatggacatga

SEQ ID NO: 369 - RNA, 21 nt, synthetic construct
  source 1..21: mol_type = other RNA
ataattctactttgagtgctg

SEQ ID NO: 370 - RNA, 21 nt, synthetic construct
  source 1..21: mol_type = other RNA
atacacttacactttatgcac

SEQ ID NO: 371 - RNA, 21 nt, synthetic construct
  source 1..21: mol_type = other RNA
atacatcaaacatggagacag

SEQ ID NO: 372 - RNA, 21 nt, synthetic construct
  source 1..21: mol_type = other RNA
atatgcttatacacttacact

SEQ ID NO: 373 - RNA, 21 nt, synthetic construct
  source 1..21: mol_type = other RNA
atattaaaaagcaagcaagca

SEQ ID NO: 374 - RNA, 21 nt, synthetic construct
  source 1..21: mol_type = other RNA
atcaaacatggagacagcact

SEQ ID NO: 375 - RNA, 21 nt, synthetic construct
  source 1..21: mol_type = other RNA
atcatgtccatgttaacatta

SEQ ID NO: 376 - RNA, 21 nt, synthetic construct
  source 1..21: mol_type = other RNA
atctgagcaggttgctccaca

SEQ ID NO: 377 - RNA, 21 nt, synthetic construct
  source 1..21: mol_type = other RNA
atgaattccaaattctgcttg

SEQ ID NO: 378 - RNA, 21 nt, synthetic construct
  source 1..21: mol_type = other RNA
atgcacaaaatgtagggttat

SEQ ID NO: 379 - RNA, 21 nt, synthetic construct
  source 1..21: mol_type = other RNA
atgccgcatttggattggatg

SEQ ID NO: 380 - RNA, 21 nt, synthetic construct
  source 1..21: mol_type = other RNA
atgcttatacacttacacttt

SEQ ID NO: 381 - RNA, 21 nt, synthetic construct
  source 1..21: mol_type = other RNA
atggacatgatcttctttata

SEQ ID NO: 382 - RNA, 21 nt, synthetic construct
  source 1..21: mol_type = other RNA
atggagacagcactcaaagta

SEQ ID NO: 383 - RNA, 21 nt, synthetic construct
  source 1..21: mol_type = other RNA
atgtatctgagcaggttgctc

SEQ ID NO: 384 - RNA, 21 nt, synthetic construct
  source 1..21: mol_type = other RNA
atgttaacatggacatgatct

SEQ ID NO: 385 - RNA, 21 nt, synthetic construct
  source 1..21: mol_type = other RNA
atgtttgatgtatctgagcag

SEQ ID NO: 386 - RNA, 21 nt, synthetic construct
  source 1..21: mol_type = other RNA
attaaaaagcaagcaagcaga

SEQ ID NO: 387 - RNA, 21 nt, synthetic construct
  source 1..21: mol_type = other RNA
attataaagaagatcatgtcc

SEQ ID NO: 388 - RNA, 21 nt, synthetic construct
  source 1..21: mol_type = other RNA
attataaccctacattttgtg

SEQ ID NO: 389 - RNA, 21 nt, synthetic construct
  source 1..21: mol_type = other RNA
attcatccaatccaaatgcgg

SEQ ID NO: 390 - RNA, 21 nt, synthetic construct
  source 1..21: mol_type = other RNA
attccaaattctgcttgcttg

SEQ ID NO: 391 - RNA, 21 nt, synthetic construct
  source 1..21: mol_type = other RNA
attctactttgagtgctgtct

SEQ ID NO: 392 - RNA, 21 nt, synthetic construct
  source 1..21: mol_type = other RNA
attctgcttgcttgcttttta

SEQ ID NO: 393 - RNA, 21 nt, synthetic construct
  source 1..21: mol_type = other RNA
attggatgaattccaaattct

SEQ ID NO: 394 - RNA, 21 nt, synthetic construct
  source 1..21: mol_type = other RNA
atttggaattcatccaatcca

SEQ ID NO: 395 - RNA, 21 nt, synthetic construct
  source 1..21: mol_type = other RNA
atttggattggatgaattcca

SEQ ID NO: 396 - RNA, 21 nt, synthetic construct
  source 1..21: mol_type = other RNA
attttgtgcataaagtgtaag

SEQ ID NO: 397 - RNA, 21 nt, synthetic construct
  source 1..21: mol_type = other RNA
caaacatggagacagcactca

SEQ ID NO: 398 - RNA, 21 nt, synthetic construct
  source 1..21: mol_type = other RNA
caaattctgcttgcttgcttt

SEQ ID NO: 399 - RNA, 21 nt, synthetic construct
  source 1..21: mol_type = other RNA
caacctgctcagatacatcaa

SEQ ID NO: 400 - RNA, 21 nt, synthetic construct
  source 1..21: mol_type = other RNA
caagcaagcagaatttggaat

SEQ ID NO: 401 - RNA, 21 nt, synthetic construct
  source 1..21: mol_type = other RNA
caagcagaatttggaattcat

SEQ ID NO: 402 - RNA, 21 nt, synthetic construct
  source 1..21: mol_type = other RNA
caatattaaaaagcaagcaag

SEQ ID NO: 403 - RNA, 21 nt, synthetic construct
  source 1..21: mol_type = other RNA
cacaaaatgtagggttataat

SEQ ID NO: 404 - RNA, 21 nt, synthetic construct
  source 1..21: mol_type = other RNA
cacttacactttatgcacaaa

SEQ ID NO: 405 - RNA, 21 nt, synthetic construct
  source 1..21: mol_type = other RNA
cactttatgcacaaaatgtag

SEQ ID NO: 406 - RNA, 21 nt, synthetic construct
  source 1..21: mol_type = other RNA
cagaatttggaattcatccaa

SEQ ID NO: 407 - RNA, 21 nt, synthetic construct
  source 1..21: mol_type = other RNA
cagatacatcaaacatggaga

SEQ ID NO: 408 - RNA, 21 nt, synthetic construct
  source 1..21: mol_type = other RNA
cagcactcaaagtagaattat

SEQ ID NO: 409 - RNA, 21 nt, synthetic construct
  source 1..21: mol_type = other RNA
cataaagtgtaagtgtataag

SEQ ID NO: 410 - RNA, 21 nt, synthetic construct
  source 1..21: mol_type = other RNA
catcaaacatggagacagcac

SEQ ID NO: 411 - RNA, 21 nt, synthetic construct
  source 1..21: mol_type = other RNA
catccaatccaaatgcggcat

SEQ ID NO: 412 - RNA, 21 nt, synthetic construct
  source 1..21: mol_type = other RNA
catggacatgatcttctttat

SEQ ID NO: 413 - RNA, 21 nt, synthetic construct
  source 1..21: mol_type = other RNA
catggagacagcactcaaagt

SEQ ID NO: 414 - RNA, 21 nt, synthetic construct
  source 1..21: mol_type = other RNA
catgtccatgttaacattatt

SEQ ID NO: 415 - RNA, 21 nt, synthetic construct
  source 1..21: mol_type = other RNA
catgtttgatgtatctgagca

SEQ ID NO: 416 - RNA, 21 nt, synthetic construct
  source 1..21: mol_type = other RNA
catttggattggatgaattcc

SEQ ID NO: 417 - RNA, 21 nt, synthetic construct
  source 1..21: mol_type = other RNA
cattttgtgcataaagtgtaa

SEQ ID NO: 418 - RNA, 21 nt, synthetic construct
  source 1..21: mol_type = other RNA
ccaaattctgcttgcttgctt

SEQ ID NO: 419 - RNA, 21 nt, synthetic construct
  source 1..21: mol_type = other RNA
ccatgtttgatgtatctgagc

SEQ ID NO: 420 - RNA, 21 nt, synthetic construct
  source 1..21: mol_type = other RNA
ccctacattttgtgcataaag

SEQ ID NO: 421 - RNA, 21 nt, synthetic construct
  source 1..21: mol_type = other RNA
ccgcatttggattggatgaat

SEQ ID NO: 422 - RNA, 21 nt, synthetic construct
  source 1..21: mol_type = other RNA
cctacattttgtgcataaagt

SEQ ID NO: 423 - RNA, 21 nt, synthetic construct
  source 1..21: mol_type = other RNA
cctgctcagatacatcaaaca

SEQ ID NO: 424 - RNA, 21 nt, synthetic construct
  source 1..21: mol_type = other RNA
cctgtggagcaacctgctcag

SEQ ID NO: 425 - RNA, 21 nt, synthetic construct
  source 1..21: mol_type = other RNA
cgcatttggattggatgaatt

SEQ ID NO: 426 - RNA, 21 nt, synthetic construct
  source 1..21: mol_type = other RNA
ctacattttgtgcataaagtg

SEQ ID NO: 427 - RNA, 21 nt, synthetic construct
  source 1..21: mol_type = other RNA
ctacctgtggagcaacctgct

SEQ ID NO: 428 - RNA, 21 nt, synthetic construct
  source 1..21: mol_type = other RNA
ctactttgagtgctgtctcca

SEQ ID NO: 429 - RNA, 21 nt, synthetic construct
  source 1..21: mol_type = other RNA
ctagagctacctgtggagcaa

SEQ ID NO: 430 - RNA, 21 nt, synthetic construct
  source 1..21: mol_type = other RNA
ctcagatacatcaaacatgga

SEQ ID NO: 431 - RNA, 21 nt, synthetic construct
  source 1..21: mol_type = other RNA
ctccatgtttgatgtatctga

SEQ ID NO: 432 - RNA, 21 nt, synthetic construct
  source 1..21: mol_type = other RNA
ctgagcaggttgctccacagg

SEQ ID NO: 433 - RNA, 21 nt, synthetic construct
  source 1..21: mol_type = other RNA
ctgctcagatacatcaaacat

SEQ ID NO: 434 - RNA, 21 nt, synthetic construct
  source 1..21: mol_type = other RNA
ctgcttgcttgctttttaata

SEQ ID NO: 435 - RNA, 21 nt, synthetic construct
  source 1..21: mol_type = other RNA
ctgtctccatgtttgatgtat

SEQ ID NO: 436 - RNA, 21 nt, synthetic construct
  source 1..21: mol_type = other RNA
ctgtggagcaacctgctcaga

SEQ ID NO: 437 - RNA, 21 nt, synthetic construct
  source 1..21: mol_type = other RNA
cttacactttatgcacaaaat

SEQ ID NO: 438 - RNA, 21 nt, synthetic construct
  source 1..21: mol_type = other RNA
cttatacacttacactttatg

SEQ ID NO: 439 - RNA, 21 nt, synthetic construct
  source 1..21: mol_type = other RNA
cttgcttgctttttaatattg

SEQ ID NO: 440 - RNA, 21 nt, synthetic construct
  source 1..21: mol_type = other RNA
ctttatgcacaaaatgtaggg

SEQ ID NO: 441 - RNA, 21 nt, synthetic construct
  source 1..21: mol_type = other RNA
ctttgagtgctgtctccatgt

SEQ ID NO: 442 - RNA, 21 nt, synthetic construct
  source 1..21: mol_type = other RNA
gaagatcatgtccatgttaac

SEQ ID NO: 443 - RNA, 21 nt, synthetic construct
  source 1..21: mol_type = other RNA
gaagatgccgcatttggattg

SEQ ID NO: 444 - RNA, 21 nt, synthetic construct
  source 1..21: mol_type = other RNA
gaattcatccaatccaaatgc

SEQ ID NO: 445 - RNA, 21 nt, synthetic construct
  source 1..21: mol_type = other RNA
gaattccaaattctgcttgct

SEQ ID NO: 446 - RNA, 21 nt, synthetic construct
  source 1..21: mol_type = other RNA
gaatttggaattcatccaatc

SEQ ID NO: 447 - RNA, 21 nt, synthetic construct
  source 1..21: mol_type = other RNA
gacagcactcaaagtagaatt

SEQ ID NO: 448 - RNA, 21 nt, synthetic construct
  source 1..21: mol_type = other RNA
gagacagcactcaaagtagaa

SEQ ID NO: 449 - RNA, 21 nt, synthetic construct
  source 1..21: mol_type = other RNA
gagcaacctgctcagatacat

SEQ ID NO: 450 - RNA, 21 nt, synthetic construct
  source 1..21: mol_type = other RNA
gagctacctgtggagcaacct

SEQ ID NO: 451 - RNA, 21 nt, synthetic construct
  source 1..21: mol_type = other RNA
gagtgctgtctccatgtttga

SEQ ID NO: 452 - RNA, 21 nt, synthetic construct
  source 1..21: mol_type = other RNA
gatacatcaaacatggagaca

SEQ ID NO: 453 - RNA, 21 nt, synthetic construct
  source 1..21: mol_type = other RNA
gatatgcttatacacttacac

SEQ ID NO: 454 - RNA, 21 nt, synthetic construct
  source 1..21: mol_type = other RNA
gatcatgtccatgttaacatt

SEQ ID NO: 455 - RNA, 21 nt, synthetic construct
  source 1..21: mol_type = other RNA
gatgaattccaaattctgctt

SEQ ID NO: 456 - RNA, 21 nt, synthetic construct
  source 1..21: mol_type = other RNA
gatgccgcatttggattggat

SEQ ID NO: 457 - RNA, 21 nt, synthetic construct
  source 1..21: mol_type = other RNA
gatgtatctgagcaggttgct

SEQ ID NO: 458 - RNA, 21 nt, synthetic construct
  source 1..21: mol_type = other RNA
gattggatgaattccaaattc

SEQ ID NO: 459 - RNA, 21 nt, synthetic construct
  source 1..21: mol_type = other RNA
gcaacctgctcagatacatca

SEQ ID NO: 460 - RNA, 21 nt, synthetic construct
  source 1..21: mol_type = other RNA
gcaagcaagcagaatttggaa

SEQ ID NO: 461 - RNA, 21 nt, synthetic construct
  source 1..21: mol_type = other RNA
gcaagcagaatttggaattca

SEQ ID NO: 462 - RNA, 21 nt, synthetic construct
  source 1..21: mol_type = other RNA
gcacaaaatgtagggttataa

SEQ ID NO: 463 - RNA, 21 nt, synthetic construct
  source 1..21: mol_type = other RNA
gcactcaaagtagaattataa

SEQ ID NO: 464 - RNA, 21 nt, synthetic construct
  source 1..21: mol_type = other RNA
gcagaatttggaattcatcca

SEQ ID NO: 465 - RNA, 21 nt, synthetic construct
  source 1..21: mol_type = other RNA
gcataaagtgtaagtgtataa

SEQ ID NO: 466 - RNA, 21 nt, synthetic construct
  source 1..21: mol_type = other RNA
gcatttggattggatgaattc

SEQ ID NO: 467 - RNA, 21 nt, synthetic construct
  source 1..21: mol_type = other RNA
gccgcatttggattggatgaa

SEQ ID NO: 468 - RNA, 21 nt, synthetic construct
  source 1..21: mol_type = other RNA
gctacctgtggagcaacctgc

SEQ ID NO: 469 - RNA, 21 nt, synthetic construct
  source 1..21: mol_type = other RNA
gctcagatacatcaaacatgg

SEQ ID NO: 470 - RNA, 21 nt, synthetic construct
  source 1..21: mol_type = other RNA
gctgtctccatgtttgatgta

SEQ ID NO: 471 - RNA, 21 nt, synthetic construct
  source 1..21: mol_type = other RNA
gcttatacacttacactttat

SEQ ID NO: 472 - RNA, 21 nt, synthetic construct
  source 1..21: mol_type = other RNA
gcttgcttgctttttaatatt

SEQ ID NO: 473 - RNA, 21 nt, synthetic construct
  source 1..21: mol_type = other RNA
ggaattcatccaatccaaatg

SEQ ID NO: 474 - RNA, 21 nt, synthetic construct
  source 1..21: mol_type = other RNA
ggacatgatcttctttataat

SEQ ID NO: 475 - RNA, 21 nt, synthetic construct
  source 1..21: mol_type = other RNA
ggagacagcactcaaagtaga

SEQ ID NO: 476 - RNA, 21 nt, synthetic construct
  source 1..21: mol_type = other RNA
ggagcaacctgctcagataca

SEQ ID NO: 477 - RNA, 21 nt, synthetic construct
  source 1..21: mol_type = other RNA
ggatgaattccaaattctgct

SEQ ID NO: 478 - RNA, 21 nt, synthetic construct
  source 1..21: mol_type = other RNA
ggattggatgaattccaaatt

SEQ ID NO: 479 - RNA, 21 nt, synthetic construct
  source 1..21: mol_type = other RNA
gtaagtgtataagcatatcaa

SEQ ID NO: 480 - RNA, 21 nt, synthetic construct
  source 1..21: mol_type = other RNA
gtatctgagcaggttgctcca

SEQ ID NO: 481 - RNA, 21 nt, synthetic construct
  source 1..21: mol_type = other RNA
gtctccatgtttgatgtatct

SEQ ID NO: 482 - RNA, 21 nt, synthetic construct
  source 1..21: mol_type = other RNA
gtgcataaagtgtaagtgtat

SEQ ID NO: 483 - RNA, 21 nt, synthetic construct
  source 1..21: mol_type = other RNA
gtgctgtctccatgtttgatg

SEQ ID NO: 484 - RNA, 21 nt, synthetic construct
  source 1..21: mol_type = other RNA
gtggagcaacctgctcagata

SEQ ID NO: 485 - RNA, 21 nt, synthetic construct
  source 1..21: mol_type = other RNA
gtgtaagtgtataagcatatc

SEQ ID NO: 486 - RNA, 21 nt, synthetic construct
  source 1..21: mol_type = other RNA
gttaacatggacatgatcttc

SEQ ID NO: 487 - RNA, 21 nt, synthetic construct
  source 1..21: mol_type = other RNA
gtttgaagatgccgcatttgg

SEQ ID NO: 488 - RNA, 21 nt, synthetic construct
  source 1..21: mol_type = other RNA
gtttgatgtatctgagcaggt

SEQ ID NO: 489 - RNA, 21 nt, synthetic construct
  source 1..21: mol_type = other RNA
taaaaagcaagcaagcagaat

SEQ ID NO: 490 - RNA, 21 nt, synthetic construct
  source 1..21: mol_type = other RNA
taaagaagatcatgtccatgt

SEQ ID NO: 491 - RNA, 21 nt, synthetic construct
  source 1..21: mol_type = other RNA
taaagtgtaagtgtataagca

SEQ ID NO: 492 - RNA, 21 nt, synthetic construct
  source 1..21: mol_type = other RNA
taacatggacatgatcttctt

SEQ ID NO: 493 - RNA, 21 nt, synthetic construct
  source 1..21: mol_type = other RNA
taaccctacattttgtgcata

SEQ ID NO: 494 - RNA, 21 nt, synthetic construct
  source 1..21: mol_type = other RNA
taatgttaacatggacatgat

SEQ ID NO: 495 - RNA, 21 nt, synthetic construct
  source 1..21: mol_type = other RNA
taattctactttgagtgctgt

SEQ ID NO: 496 - RNA, 21 nt, synthetic construct
  source 1..21: mol_type = other RNA
tacacttacactttatgcaca

SEQ ID NO: 497 - RNA, 21 nt, synthetic construct
  source 1..21: mol_type = other RNA
tacactttatgcacaaaatgt

SEQ ID NO: 498 - RNA, 21 nt, synthetic construct
  source 1..21: mol_type = other RNA
tacatcaaacatggagacagc

SEQ ID NO: 499 - RNA, 21 nt, synthetic construct
  source 1..21: mol_type = other RNA
tacattttgtgcataaagtgt

SEQ ID NO: 500 - RNA, 21 nt, synthetic construct
  source 1..21: mol_type = other RNA
tacctgtggagcaacctgctc

SEQ ID NO: 501 - RNA, 21 nt, synthetic construct
  source 1..21: mol_type = other RNA
tactttgagtgctgtctccat

SEQ ID NO: 502 - RNA, 21 nt, synthetic construct
  source 1..21: mol_type = other RNA
tagagctacctgtggagcaac

SEQ ID NO: 503 - RNA, 21 nt, synthetic construct
  source 1..21: mol_type = other RNA
tataaagaagatcatgtccat

SEQ ID NO: 504 - RNA, 21 nt, synthetic construct
  source 1..21: mol_type = other RNA
tataaccctacattttgtgca

SEQ ID NO: 505 - RNA, 21 nt, synthetic construct
  source 1..21: mol_type = other RNA
tataattctactttgagtgct

SEQ ID NO: 506 - RNA, 21 nt, synthetic construct
  source 1..21: mol_type = other RNA
tatacacttacactttatgca

SEQ ID NO: 507 - RNA, 21 nt, synthetic construct
  source 1..21: mol_type = other RNA
tatctgagcaggttgctccac

SEQ ID NO: 508 - RNA, 21 nt, synthetic construct
  source 1..21: mol_type = other RNA
tatgcacaaaatgtagggtta

SEQ ID NO: 509 - RNA, 21 nt, synthetic construct
  source 1..21: mol_type = other RNA
tatgcttatacacttacactt

SEQ ID NO: 510 - RNA, 21 nt, synthetic construct
  source 1..21: mol_type = other RNA
tattaaaaagcaagcaagcag

SEQ ID NO: 511 - RNA, 21 nt, synthetic construct
  source 1..21: mol_type = other RNA
tcaaacatggagacagcactc

SEQ ID NO: 512 - RNA, 21 nt, synthetic construct
  source 1..21: mol_type = other RNA
tcagatacatcaaacatggag

SEQ ID NO: 513 - RNA, 21 nt, synthetic construct
  source 1..21: mol_type = other RNA
tcatccaatccaaatgcggca

SEQ ID NO: 514 - RNA, 21 nt, synthetic construct
  source 1..21: mol_type = other RNA
tcatgtccatgttaacattat

SEQ ID NO: 515 - RNA, 21 nt, synthetic construct
  source 1..21: mol_type = other RNA
tccaaattctgcttgcttgct

SEQ ID NO: 516 - RNA, 21 nt, synthetic construct
  source 1..21: mol_type = other RNA
tccatgtttgatgtatctgag

SEQ ID NO: 517 - RNA, 21 nt, synthetic construct
  source 1..21: mol_type = other RNA
tctactttgagtgctgtctcc

SEQ ID NO: 518 - RNA, 21 nt, synthetic construct
  source 1..21: mol_type = other RNA
tctccatgtttgatgtatctg

SEQ ID NO: 519 - RNA, 21 nt, synthetic construct
  source 1..21: mol_type = other RNA
tctgagcaggttgctccacag

SEQ ID NO: 520 - RNA, 21 nt, synthetic construct
  source 1..21: mol_type = other RNA
tctgcttgcttgctttttaat

SEQ ID NO: 521 - RNA, 21 nt, synthetic construct
  source 1..21: mol_type = other RNA
tgaagatgccgcatttggatt

SEQ ID NO: 522 - RNA, 21 nt, synthetic construct
  source 1..21: mol_type = other RNA
tgaattccaaattctgcttgc

SEQ ID NO: 523 - RNA, 21 nt, synthetic construct
  source 1..21: mol_type = other RNA
tgagcaggttgctccacaggt

SEQ ID NO: 524 - RNA, 21 nt, synthetic construct
  source 1..21: mol_type = other RNA
tgagtgctgtctccatgtttg

SEQ ID NO: 525 - RNA, 21 nt, synthetic construct
  source 1..21: mol_type = other RNA
tgatatgcttatacacttaca

SEQ ID NO: 526 - RNA, 21 nt, synthetic construct
  source 1..21: mol_type = other RNA
tgatgtatctgagcaggttgc

SEQ ID NO: 527 - RNA, 21 nt, synthetic construct
  source 1..21: mol_type = other RNA
tgcacaaaatgtagggttata

SEQ ID NO: 528 - RNA, 21 nt, synthetic construct
  source 1..21: mol_type = other RNA
tgcataaagtgtaagtgtata

SEQ ID NO: 529 - RNA, 21 nt, synthetic construct
  source 1..21: mol_type = other RNA
tgccgcatttggattggatga

SEQ ID NO: 530 - RNA, 21 nt, synthetic construct
  source 1..21: mol_type = other RNA
tgctcagatacatcaaacatg

SEQ ID NO: 531 - RNA, 21 nt, synthetic construct
  source 1..21: mol_type = other RNA
tgctgtctccatgtttgatgt

SEQ ID NO: 532 - RNA, 21 nt, synthetic construct
  source 1..21: mol_type = other RNA
tgcttatacacttacacttta

SEQ ID NO: 533 - RNA, 21 nt, synthetic construct
  source 1..21: mol_type = other RNA
tgcttgcttgctttttaatat

SEQ ID NO: 534 - RNA, 21 nt, synthetic construct
  source 1..21: mol_type = other RNA
tggaattcatccaatccaaat

SEQ ID NO: 535 - RNA, 21 nt, synthetic construct
  source 1..21: mol_type = other RNA
tggacatgatcttctttataa

SEQ ID NO: 536 - RNA, 21 nt, synthetic construct
  source 1..21: mol_type = other RNA
tggagacagcactcaaagtag

SEQ ID NO: 537 - RNA, 21 nt, synthetic construct
  source 1..21: mol_type = other RNA
tggagcaacctgctcagatac

SEQ ID NO: 538 - RNA, 21 nt, synthetic construct
  source 1..21: mol_type = other RNA
tggatgaattccaaattctgc

SEQ ID NO: 539 - RNA, 21 nt, synthetic construct
  source 1..21: mol_type = other RNA
tggattggatgaattccaaat

SEQ ID NO: 540 - RNA, 21 nt, synthetic construct
  source 1..21: mol_type = other RNA
tgtaagtgtataagcatatca

SEQ ID NO: 541 - RNA, 21 nt, synthetic construct
  source 1..21: mol_type = other RNA
tgtatctgagcaggttgctcc

SEQ ID NO: 542 - RNA, 21 nt, synthetic construct
  source 1..21: mol_type = other RNA
tgtctccatgtttgatgtatc

SEQ ID NO: 543 - RNA, 21 nt, synthetic construct
  source 1..21: mol_type = other RNA
tgtgcataaagtgtaagtgta

SEQ ID NO: 544 - RNA, 21 nt, synthetic construct
  source 1..21: mol_type = other RNA
tgtggagcaacctgctcagat

SEQ ID NO: 545 - RNA, 21 nt, synthetic construct
  source 1..21: mol_type = other RNA
tgttaacatggacatgatctt

SEQ ID NO: 546 - RNA, 21 nt, synthetic construct
  source 1..21: mol_type = other RNA
tgtttgatgtatctgagcagg

SEQ ID NO: 547 - RNA, 21 nt, synthetic construct
  source 1..21: mol_type = other RNA
ttaaaaagcaagcaagcagaa

SEQ ID NO: 548 - RNA, 21 nt, synthetic construct
  source 1..21: mol_type = other RNA
ttaacatggacatgatcttct

SEQ ID NO: 549 - RNA, 21 nt, synthetic construct
  source 1..21: mol_type = other RNA
ttacactttatgcacaaaatg

SEQ ID NO: 550 - RNA, 21 nt, synthetic construct
  source 1..21: mol_type = other RNA
ttataaagaagatcatgtcca

SEQ ID NO: 551 - RNA, 21 nt, synthetic construct
  source 1..21: mol_type = other RNA
ttataaccctacattttgtgc

SEQ ID NO: 552 - RNA, 21 nt, synthetic construct
  source 1..21: mol_type = other RNA
ttataattctactttgagtgc

SEQ ID NO: 553 - RNA, 21 nt, synthetic construct
  source 1..21: mol_type = other RNA
ttatacacttacactttatgc

SEQ ID NO: 554 - RNA, 21 nt, synthetic construct
  source 1..21: mol_type = other RNA
ttatgcacaaaatgtagggtt

SEQ ID NO: 555 - RNA, 21 nt, synthetic construct
  source 1..21: mol_type = other RNA
ttcatccaatccaaatgcggc

SEQ ID NO: 556 - RNA, 21 nt, synthetic construct
  source 1..21: mol_type = other RNA
ttccaaattctgcttgcttgc

SEQ ID NO: 557 - RNA, 21 nt, synthetic construct
  source 1..21: mol_type = other RNA
ttctactttgagtgctgtctc

SEQ ID NO: 558 - RNA, 21 nt, synthetic construct
  source 1..21: mol_type = other RNA
ttctgcttgcttgctttttaa

SEQ ID NO: 559 - RNA, 21 nt, synthetic construct
  source 1..21: mol_type = other RNA
ttgaagatgccgcatttggat

SEQ ID NO: 560 - RNA, 21 nt, synthetic construct
  source 1..21: mol_type = other RNA
ttgagtgctgtctccatgttt

SEQ ID NO: 561 - RNA, 21 nt, synthetic construct
  source 1..21: mol_type = other RNA
ttgatatgcttatacacttac

SEQ ID NO: 562 - RNA, 21 nt, synthetic construct
  source 1..21: mol_type = other RNA
ttgatgtatctgagcaggttg

SEQ ID NO: 563 - RNA, 21 nt, synthetic construct
  source 1..21: mol_type = other RNA
ttggaattcatccaatccaaa

SEQ ID NO: 564 - RNA, 21 nt, synthetic construct
  source 1..21: mol_type = other RNA
ttggatgaattccaaattctg

SEQ ID NO: 565 - RNA, 21 nt, synthetic construct
  source 1..21: mol_type = other RNA
ttggattggatgaattccaaa

SEQ ID NO: 566 - RNA, 21 nt, synthetic construct
  source 1..21: mol_type = other RNA
ttgtgcataaagtgtaagtgt

SEQ ID NO: 567 - RNA, 21 nt, synthetic construct
  source 1..21: mol_type = other RNA
tttatgcacaaaatgtagggt

SEQ ID NO: 568 - RNA, 21 nt, synthetic construct
  source 1..21: mol_type = other RNA
tttgaagatgccgcatttgga

SEQ ID NO: 569 - RNA, 21 nt, synthetic construct
  source 1..21: mol_type = other RNA
tttgagtgctgtctccatgtt

SEQ ID NO: 570 - RNA, 21 nt, synthetic construct
  source 1..21: mol_type = other RNA
tttgatgtatctgagcaggtt

SEQ ID NO: 571 - RNA, 21 nt, synthetic construct
  source 1..21: mol_type = other RNA
tttggaattcatccaatccaa

SEQ ID NO: 572 - RNA, 21 nt, synthetic construct
  source 1..21: mol_type = other RNA
tttggattggatgaattccaa

SEQ ID NO: 573 - RNA, 21 nt, synthetic construct
  source 1..21: mol_type = other RNA
tttgtgcataaagtgtaagtg

SEQ ID NO: 574 - RNA, 21 nt, synthetic construct
  source 1..21: mol_type = other RNA
ttttgtgcataaagtgtaagt

SEQ ID NO: 575 - RNA, 22 nt, synthetic construct
  source 1..22: mol_type = other RNA
aaaaagcaagcaagcagaattt

SEQ ID NO: 576 - RNA, 22 nt, synthetic construct
  source 1..22: mol_type = other RNA
aaaagcaagcaagcagaatttg

SEQ ID NO: 577 - RNA, 22 nt, synthetic construct
  source 1..22: mol_type = other RNA
aaacatggagacagcactcaaa

SEQ ID NO: 578 - RNA, 22 nt, synthetic construct
  source 1..22: mol_type = other RNA
aaagaagatcatgtccatgtta

SEQ ID NO: 579 - RNA, 22 nt, synthetic construct
  source 1..22: mol_type = other RNA
aaagcaagcaagcagaatttgg

SEQ ID NO: 580 - RNA, 22 nt, synthetic construct
  source 1..22: mol_type = other RNA
aaagtgtaagtgtataagcata

SEQ ID NO: 581 - RNA, 22 nt, synthetic construct
  source 1..22: mol_type = other RNA
aaattctgcttgcttgcttttt

SEQ ID NO: 582 - RNA, 22 nt, synthetic construct
  source 1..22: mol_type = other RNA
aacatggacatgatcttcttta

SEQ ID NO: 583 - RNA, 22 nt, synthetic construct
  source 1..22: mol_type = other RNA
aacatggagacagcactcaaag

SEQ ID NO: 584 - RNA, 22 nt, synthetic construct
  source 1..22: mol_type = other RNA
aaccctacattttgtgcataaa

SEQ ID NO: 585 - RNA, 22 nt, synthetic construct
  source 1..22: mol_type = other RNA
aacctgctcagatacatcaaac

SEQ ID NO: 586 - RNA, 22 nt, synthetic construct
  source 1..22: mol_type = other RNA
aagaagatcatgtccatgttaa

SEQ ID NO: 587 - RNA, 22 nt, synthetic construct
  source 1..22: mol_type = other RNA
aagatcatgtccatgttaacat

SEQ ID NO: 588 - RNA, 22 nt, synthetic construct
  source 1..22: mol_type = other RNA
aagatgccgcatttggattgga

SEQ ID NO: 589 - RNA, 22 nt, synthetic construct
  source 1..22: mol_type = other RNA
aagcaagcaagcagaatttgga

SEQ ID NO: 590 - RNA, 22 nt, synthetic construct
  source 1..22: mol_type = other RNA
aagcaagcagaatttggaattc

SEQ ID NO: 591 - RNA, 22 nt, synthetic construct
  source 1..22: mol_type = other RNA
aagcagaatttggaattcatcc

SEQ ID NO: 592 - RNA, 22 nt, synthetic construct
  source 1..22: mol_type = other RNA
aagtgtaagtgtataagcatat

SEQ ID NO: 593 - RNA, 22 nt, synthetic construct
  source 1..22: mol_type = other RNA
aataatgttaacatggacatga

SEQ ID NO: 594 - RNA, 22 nt, synthetic construct
  source 1..22: mol_type = other RNA
aatattaaaaagcaagcaagca

SEQ ID NO: 595 - RNA, 22 nt, synthetic construct
  source 1..22: mol_type = other RNA
aatgttaacatggacatgatct

SEQ ID NO: 596 - RNA, 22 nt, synthetic construct
  source 1..22: mol_type = other RNA
aattataaagaagatcatgtcc

SEQ ID NO: 597 - RNA, 22 nt, synthetic construct
  source 1..22: mol_type = other RNA
aattcatccaatccaaatgcgg

SEQ ID NO: 598 - RNA, 22 nt, synthetic construct
  source 1..22: mol_type = other RNA
aattccaaattctgcttgcttg

SEQ ID NO: 599 - RNA, 22 nt, synthetic construct
  source 1..22: mol_type = other RNA
aattctactttgagtgctgtct

SEQ ID NO: 600 - RNA, 22 nt, synthetic construct
  source 1..22: mol_type = other RNA
aattctgcttgcttgcttttta

SEQ ID NO: 601 - RNA, 22 nt, synthetic construct
  source 1..22: mol_type = other RNA
aatttggaattcatccaatcca

SEQ ID NO: 602 - RNA, 22 nt, synthetic construct
  source 1..22: mol_type = other RNA
acacttacactttatgcacaaa

SEQ ID NO: 603 - RNA, 22 nt, synthetic construct
  source 1..22: mol_type = other RNA
acactttatgcacaaaatgtag

SEQ ID NO: 604 - RNA, 22 nt, synthetic construct
  source 1..22: mol_type = other RNA
acagcactcaaagtagaattat

SEQ ID NO: 605 - RNA, 22 nt, synthetic construct
  source 1..22: mol_type = other RNA
acatcaaacatggagacagcac

SEQ ID NO: 606 - RNA, 22 nt, synthetic construct
  source 1..22: mol_type = other RNA
acatggacatgatcttctttat

SEQ ID NO: 607 - RNA, 22 nt, synthetic construct
  source 1..22: mol_type = other RNA
acatggagacagcactcaaagt

SEQ ID NO: 608 - RNA, 22 nt, synthetic construct
  source 1..22: mol_type = other RNA
acattttgtgcataaagtgtaa

SEQ ID NO: 609 - RNA, 22 nt, synthetic construct
  source 1..22: mol_type = other RNA
accctacattttgtgcataaag

SEQ ID NO: 610 - RNA, 22 nt, synthetic construct
  source 1..22: mol_type = other RNA
acctgctcagatacatcaaaca

SEQ ID NO: 611 - RNA, 22 nt, synthetic construct
  source 1..22: mol_type = other RNA
acctgtggagcaacctgctcag

SEQ ID NO: 612 - RNA, 22 nt, synthetic construct
  source 1..22: mol_type = other RNA
acttacactttatgcacaaaat

SEQ ID NO: 613 - RNA, 22 nt, synthetic construct
  source 1..22: mol_type = other RNA
actttatgcacaaaatgtaggg

SEQ ID NO: 614 - RNA, 22 nt, synthetic construct
  source 1..22: mol_type = other RNA
actttgagtgctgtctccatgt

SEQ ID NO: 615 - RNA, 22 nt, synthetic construct
  source 1..22: mol_type = other RNA
agaagatcatgtccatgttaac

SEQ ID NO: 616 - RNA, 22 nt, synthetic construct
  source 1..22: mol_type = other RNA
agaatttggaattcatccaatc

SEQ ID NO: 617 - RNA, 22 nt, synthetic construct
  source 1..22: mol_type = other RNA
agacagcactcaaagtagaatt

SEQ ID NO: 618 - RNA, 22 nt, synthetic construct
  source 1..22: mol_type = other RNA
agagctacctgtggagcaacct

SEQ ID NO: 619 - RNA, 22 nt, synthetic construct
  source 1..22: mol_type = other RNA
agatacatcaaacatggagaca

SEQ ID NO: 620 - RNA, 22 nt, synthetic construct
  source 1..22: mol_type = other RNA
agatcatgtccatgttaacatt

SEQ ID NO: 621 - RNA, 22 nt, synthetic construct
  source 1..22: mol_type = other RNA
agatgccgcatttggattggat

SEQ ID NO: 622 - RNA, 22 nt, synthetic construct
  source 1..22: mol_type = other RNA
agcaacctgctcagatacatca

SEQ ID NO: 623 - RNA, 22 nt, synthetic construct
  source 1..22: mol_type = other RNA
agcaagcaagcagaatttggaa

SEQ ID NO: 624 - RNA, 22 nt, synthetic construct
  source 1..22: mol_type = other RNA
agcaagcagaatttggaattca

SEQ ID NO: 625 - RNA, 22 nt, synthetic construct
  source 1..22: mol_type = other RNA
agcactcaaagtagaattataa

SEQ ID NO: 626 - RNA, 22 nt, synthetic construct
  source 1..22: mol_type = other RNA
agcagaatttggaattcatcca

SEQ ID NO: 627 - RNA, 22 nt, synthetic construct
  source 1..22: mol_type = other RNA
agctacctgtggagcaacctgc

SEQ ID NO: 628 - RNA, 22 nt, synthetic construct
  source 1..22: mol_type = other RNA
agtgctgtctccatgtttgatg

SEQ ID NO: 629 - RNA, 22 nt, synthetic construct
  source 1..22: mol_type = other RNA
agtgtaagtgtataagcatatc

SEQ ID NO: 630 - RNA, 22 nt, synthetic construct
  source 1..22: mol_type = other RNA
ataaagaagatcatgtccatgt

SEQ ID NO: 631 - RNA, 22 nt, synthetic construct
  source 1..22: mol_type = other RNA
ataaagtgtaagtgtataagca

SEQ ID NO: 632 - RNA, 22 nt, synthetic construct
  source 1..22: mol_type = other RNA
ataaccctacattttgtgcata

SEQ ID NO: 633 - RNA, 22 nt, synthetic construct
  source 1..22: mol_type = other RNA
ataatgttaacatggacatgat

SEQ ID NO: 634 - RNA, 22 nt, synthetic construct
  source 1..22: mol_type = other RNA
ataattctactttgagtgctgt

SEQ ID NO: 635 - RNA, 22 nt, synthetic construct
  source 1..22: mol_type = other RNA
atacacttacactttatgcaca

SEQ ID NO: 636 - RNA, 22 nt, synthetic construct
  source 1..22: mol_type = other RNA
atacatcaaacatggagacagc

SEQ ID NO: 637 - RNA, 22 nt, synthetic construct
  source 1..22: mol_type = other RNA
atatgcttatacacttacactt

SEQ ID NO: 638 - RNA, 22 nt, synthetic construct
  source 1..22: mol_type = other RNA
atattaaaaagcaagcaagcag

SEQ ID NO: 639 - RNA, 22 nt, synthetic construct
  source 1..22: mol_type = other RNA
atcaaacatggagacagcactc

SEQ ID NO: 640 - RNA, 22 nt, synthetic construct
  source 1..22: mol_type = other RNA
atcatgtccatgttaacattat

SEQ ID NO: 641 - RNA, 22 nt, synthetic construct
  source 1..22: mol_type = other RNA
atctgagcaggttgctccacag

SEQ ID NO: 642 - RNA, 22 nt, synthetic construct
  source 1..22: mol_type = other RNA
atgaattccaaattctgcttgc

SEQ ID NO: 643 - RNA, 22 nt, synthetic construct
  source 1..22: mol_type = other RNA
atgcacaaaatgtagggttata

SEQ ID NO: 644 - RNA, 22 nt, synthetic construct
  source 1..22: mol_type = other RNA
atgccgcatttggattggatga

SEQ ID NO: 645 - RNA, 22 nt, synthetic construct
  source 1..22: mol_type = other RNA
atgcttatacacttacacttta

SEQ ID NO: 646 - RNA, 22 nt, synthetic construct
  source 1..22: mol_type = other RNA
atggacatgatcttctttataa

SEQ ID NO: 647 - RNA, 22 nt, synthetic construct
  source 1..22: mol_type = other RNA
atggagacagcactcaaagtag

SEQ ID NO: 648 - RNA, 22 nt, synthetic construct
  source 1..22: mol_type = other RNA
atgtatctgagcaggttgctcc

SEQ ID NO: 649 - RNA, 22 nt, synthetic construct
  source 1..22: mol_type = other RNA
atgttaacatggacatgatctt

SEQ ID NO: 650 - RNA, 22 nt, synthetic construct
  source 1..22: mol_type = other RNA
atgtttgatgtatctgagcagg

SEQ ID NO: 651 - RNA, 22 nt, synthetic construct
  source 1..22: mol_type = other RNA
attaaaaagcaagcaagcagaa

SEQ ID NO: 652 - RNA, 22 nt, synthetic construct
  source 1..22: mol_type = other RNA
attataaagaagatcatgtcca

SEQ ID NO: 653 - RNA, 22 nt, synthetic construct
  source 1..22: mol_type = other RNA
attataaccctacattttgtgc

SEQ ID NO: 654 - RNA, 22 nt, synthetic construct
  source 1..22: mol_type = other RNA
attcatccaatccaaatgcggc

SEQ ID NO: 655 - RNA, 22 nt, synthetic construct
  source 1..22: mol_type = other RNA
attccaaattctgcttgcttgc

SEQ ID NO: 656 - RNA, 22 nt, synthetic construct
  source 1..22: mol_type = other RNA
attctactttgagtgctgtctc

SEQ ID NO: 657 - RNA, 22 nt, synthetic construct
  source 1..22: mol_type = other RNA
attctgcttgcttgctttttaa

SEQ ID NO: 658 - RNA, 22 nt, synthetic construct
  source 1..22: mol_type = other RNA
attgatatgcttatacacttac

SEQ ID NO: 659 - RNA, 22 nt, synthetic construct
  source 1..22: mol_type = other RNA
attggatgaattccaaattctg

SEQ ID NO: 660 - RNA, 22 nt, synthetic construct
  source 1..22: mol_type = other RNA
atttggaattcatccaatccaa

SEQ ID NO: 661 - RNA, 22 nt, synthetic construct
  source 1..22: mol_type = other RNA
atttggattggatgaattccaa

SEQ ID NO: 662 - RNA, 22 nt, synthetic construct
  source 1..22: mol_type = other RNA
attttgtgcataaagtgtaagt

SEQ ID NO: 663 - RNA, 22 nt, synthetic construct
  source 1..22: mol_type = other RNA
caaacatggagacagcactcaa

SEQ ID NO: 664 - RNA, 22 nt, synthetic construct
  source 1..22: mol_type = other RNA
caaattctgcttgcttgctttt

SEQ ID NO: 665 - RNA, 22 nt, synthetic construct
  source 1..22: mol_type = other RNA
caacctgctcagatacatcaaa

SEQ ID NO: 666 - RNA, 22 nt, synthetic construct
  source 1..22: mol_type = other RNA
caagcaagcagaatttggaatt

SEQ ID NO: 667 - RNA, 22 nt, synthetic construct
  source 1..22: mol_type = other RNA
caagcagaatttggaattcatc

SEQ ID NO: 668 - RNA, 22 nt, synthetic construct
  source 1..22: mol_type = other RNA
caatattaaaaagcaagcaagc

SEQ ID NO: 669 - RNA, 22 nt, synthetic construct
  source 1..22: mol_type = other RNA
cacaaaatgtagggttataata

SEQ ID NO: 670 - RNA, 22 nt, synthetic construct
  source 1..22: mol_type = other RNA
cactcaaagtagaattataaag

SEQ ID NO: 671 - RNA, 22 nt, synthetic construct
  source 1..22: mol_type = other RNA
cacttacactttatgcacaaaa

SEQ ID NO: 672 - RNA, 22 nt, synthetic construct
  source 1..22: mol_type = other RNA
cactttatgcacaaaatgtagg

SEQ ID NO: 673 - RNA, 22 nt, synthetic construct
  source 1..22: mol_type = other RNA
cagaatttggaattcatccaat

SEQ ID NO: 674 - RNA, 22 nt, synthetic construct
  source 1..22: mol_type = other RNA
cagatacatcaaacatggagac

SEQ ID NO: 675 - RNA, 22 nt, synthetic construct
  source 1..22: mol_type = other RNA
cagcactcaaagtagaattata

SEQ ID NO: 676 - RNA, 22 nt, synthetic construct
  source 1..22: mol_type = other RNA
cataaagtgtaagtgtataagc

SEQ ID NO: 677 - RNA, 22 nt, synthetic construct
  source 1..22: mol_type = other RNA
catcaaacatggagacagcact

SEQ ID NO: 678 - RNA, 22 nt, synthetic construct
  source 1..22: mol_type = other RNA
catggacatgatcttctttata

SEQ ID NO: 679 - RNA, 22 nt, synthetic construct
  source 1..22: mol_type = other RNA
catggagacagcactcaaagta

SEQ ID NO: 680 - RNA, 22 nt, synthetic construct
  source 1..22: mol_type = other RNA
catgtccatgttaacattatta

SEQ ID NO: 681 - RNA, 22 nt, synthetic construct
  source 1..22: mol_type = other RNA
catgttaacattattataaccc

SEQ ID NO: 682 - RNA, 22 nt, synthetic construct
  source 1..22: mol_type = other RNA
catgtttgatgtatctgagcag

SEQ ID NO: 683 - RNA, 22 nt, synthetic construct
  source 1..22: mol_type = other RNA
catttggattggatgaattcca

SEQ ID NO: 684 - RNA, 22 nt, synthetic construct
  source 1..22: mol_type = other RNA
cattttgtgcataaagtgtaag

SEQ ID NO: 685 - RNA, 22 nt, synthetic construct
  source 1..22: mol_type = other RNA
ccaaattctgcttgcttgcttt

SEQ ID NO: 686 - RNA, 22 nt, synthetic construct
  source 1..22: mol_type = other RNA
ccatgttaacattattataacc

SEQ ID NO: 687 - RNA, 22 nt, synthetic construct
  source 1..22: mol_type = other RNA
ccatgtttgatgtatctgagca

SEQ ID NO: 688 - RNA, 22 nt, synthetic construct
  source 1..22: mol_type = other RNA
ccctacattttgtgcataaagt

SEQ ID NO: 689 - RNA, 22 nt, synthetic construct
  source 1..22: mol_type = other RNA
ccgcatttggattggatgaatt

SEQ ID NO: 690 - RNA, 22 nt, synthetic construct
  source 1..22: mol_type = other RNA
cctacattttgtgcataaagtg

SEQ ID NO: 691 - RNA, 22 nt, synthetic construct
  source 1..22: mol_type = other RNA
cctgctcagatacatcaaacat

SEQ ID NO: 692 - RNA, 22 nt, synthetic construct
  source 1..22: mol_type = other RNA
cctgtggagcaacctgctcaga

SEQ ID NO: 693 - RNA, 22 nt, synthetic construct
  source 1..22: mol_type = other RNA
cgcatttggattggatgaattc

SEQ ID NO: 694 - RNA, 22 nt, synthetic construct
  source 1..22: mol_type = other RNA
ctacattttgtgcataaagtgt

SEQ ID NO: 695 - RNA, 22 nt, synthetic construct
  source 1..22: mol_type = other RNA
ctacctgtggagcaacctgctc

SEQ ID NO: 696 - RNA, 22 nt, synthetic construct
  source 1..22: mol_type = other RNA
ctactttgagtgctgtctccat

SEQ ID NO: 697 - RNA, 22 nt, synthetic construct
  source 1..22: mol_type = other RNA
ctagagctacctgtggagcaac

SEQ ID NO: 698 - RNA, 22 nt, synthetic construct
  source 1..22: mol_type = other RNA
ctcagatacatcaaacatggag

SEQ ID NO: 699 - RNA, 22 nt, synthetic construct
  source 1..22: mol_type = other RNA
ctccatgtttgatgtatctgag

SEQ ID NO: 700 - RNA, 22 nt, synthetic construct
  source 1..22: mol_type = other RNA
ctgagcaggttgctccacaggt

SEQ ID NO: 701 - RNA, 22 nt, synthetic construct
  source 1..22: mol_type = other RNA
ctgctcagatacatcaaacatg

SEQ ID NO: 702 - RNA, 22 nt, synthetic construct
  source 1..22: mol_type = other RNA
ctgcttgcttgctttttaatat

SEQ ID NO: 703 - RNA, 22 nt, synthetic construct
  source 1..22: mol_type = other RNA
ctgtctccatgtttgatgtatc

SEQ ID NO: 704 - RNA, 22 nt, synthetic construct
  source 1..22: mol_type = other RNA
ctgtggagcaacctgctcagat

SEQ ID NO: 705 - RNA, 22 nt, synthetic construct
  source 1..22: mol_type = other RNA
cttacactttatgcacaaaatg

SEQ ID NO: 706 - RNA, 22 nt, synthetic construct
  source 1..22: mol_type = other RNA
cttatacacttacactttatgc

SEQ ID NO: 707 - RNA, 22 nt, synthetic construct
  source 1..22: mol_type = other RNA
cttgcttgctttttaatattga

SEQ ID NO: 708 - RNA, 22 nt, synthetic construct
  source 1..22: mol_type = other RNA
ctttataattctactttgagtg

SEQ ID NO: 709 - RNA, 22 nt, synthetic construct
  source 1..22: mol_type = other RNA
ctttatgcacaaaatgtagggt

SEQ ID NO: 710 - RNA, 22 nt, synthetic construct
  source 1..22: mol_type = other RNA
ctttgagtgctgtctccatgtt

SEQ ID NO: 711 - RNA, 22 nt, synthetic construct
  source 1..22: mol_type = other RNA
gaagatcatgtccatgttaaca

SEQ ID NO: 712 - RNA, 22 nt, synthetic construct
  source 1..22: mol_type = other RNA
gaagatgccgcatttggattgg

SEQ ID NO: 713 - RNA, 22 nt, synthetic construct
  source 1..22: mol_type = other RNA
gaattataaagaagatcatgtc

SEQ ID NO: 714 - RNA, 22 nt, synthetic construct
  source 1..22: mol_type = other RNA
gaattcatccaatccaaatgcg

SEQ ID NO: 715 - RNA, 22 nt, synthetic construct
  source 1..22: mol_type = other RNA
gaattccaaattctgcttgctt

SEQ ID NO: 716 - RNA, 22 nt, synthetic construct
  source 1..22: mol_type = other RNA
gaatttggaattcatccaatcc

SEQ ID NO: 717 - RNA, 22 nt, synthetic construct
  source 1..22: mol_type = other RNA
gacagcactcaaagtagaatta

SEQ ID NO: 718 - RNA, 22 nt, synthetic construct
  source 1..22: mol_type = other RNA
gacatgatcttctttataattc

SEQ ID NO: 719 - RNA, 22 nt, synthetic construct
  source 1..22: mol_type = other RNA
gagacagcactcaaagtagaat

SEQ ID NO: 720 - RNA, 22 nt, synthetic construct
  source 1..22: mol_type = other RNA
gagcaacctgctcagatacatc

SEQ ID NO: 721 - RNA, 22 nt, synthetic construct
  source 1..22: mol_type = other RNA
gagctacctgtggagcaacctg

SEQ ID NO: 722 - RNA, 22 nt, synthetic construct
  source 1..22: mol_type = other RNA
gagtgctgtctccatgtttgat

SEQ ID NO: 723 - RNA, 22 nt, synthetic construct
  source 1..22: mol_type = other RNA
gatacatcaaacatggagacag

SEQ ID NO: 724 - RNA, 22 nt, synthetic construct
  source 1..22: mol_type = other RNA
gatatgcttatacacttacact

SEQ ID NO: 725 - RNA, 22 nt, synthetic construct
  source 1..22: mol_type = other RNA
gatcatgtccatgttaacatta

SEQ ID NO: 726 - RNA, 22 nt, synthetic construct
  source 1..22: mol_type = other RNA
gatgaattccaaattctgcttg

SEQ ID NO: 727 - RNA, 22 nt, synthetic construct
  source 1..22: mol_type = other RNA
gatgccgcatttggattggatg

SEQ ID NO: 728 - RNA, 22 nt, synthetic construct
  source 1..22: mol_type = other RNA
gatgtatctgagcaggttgctc

SEQ ID NO: 729 - RNA, 22 nt, synthetic construct
  source 1..22: mol_type = other RNA
gattggatgaattccaaattct

SEQ ID NO: 730 - RNA, 22 nt, synthetic construct
  source 1..22: mol_type = other RNA
gcaacctgctcagatacatcaa

SEQ ID NO: 731 - RNA, 22 nt, synthetic construct
  source 1..22: mol_type = other RNA
gcaagcaagcagaatttggaat

SEQ ID NO: 732 - RNA, 22 nt, synthetic construct
  source 1..22: mol_type = other RNA
gcaagcagaatttggaattcat

SEQ ID NO: 733 - RNA, 22 nt, synthetic construct
  source 1..22: mol_type = other RNA
gcacaaaatgtagggttataat

SEQ ID NO: 734 - RNA, 22 nt, synthetic construct
  source 1..22: mol_type = other RNA
gcactcaaagtagaattataaa

SEQ ID NO: 735 - RNA, 22 nt, synthetic construct
  source 1..22: mol_type = other RNA
gcagaatttggaattcatccaa

SEQ ID NO: 736 - RNA, 22 nt, synthetic construct
  source 1..22: mol_type = other RNA
gcataaagtgtaagtgtataag

SEQ ID NO: 737 - RNA, 22 nt, synthetic construct
  source 1..22: mol_type = other RNA
gcatttggattggatgaattcc

SEQ ID NO: 738 - RNA, 22 nt, synthetic construct
  source 1..22: mol_type = other RNA
gccgcatttggattggatgaat

SEQ ID NO: 739 - RNA, 22 nt, synthetic construct
  source 1..22: mol_type = other RNA
gctacctgtggagcaacctgct

SEQ ID NO: 740 - RNA, 22 nt, synthetic construct
  source 1..22: mol_type = other RNA
gctcagatacatcaaacatgga

SEQ ID NO: 741 - RNA, 22 nt, synthetic construct
  source 1..22: mol_type = other RNA
gctgtctccatgtttgatgtat

SEQ ID NO: 742 - RNA, 22 nt, synthetic construct
  source 1..22: mol_type = other RNA
gcttatacacttacactttatg

SEQ ID NO: 743 - RNA, 22 nt, synthetic construct
  source 1..22: mol_type = other RNA
gcttgcttgctttttaatattg

SEQ ID NO: 744 - RNA, 22 nt, synthetic construct
  source 1..22: mol_type = other RNA
ggaattcatccaatccaaatgc

SEQ ID NO: 745 - RNA, 22 nt, synthetic construct
  source 1..22: mol_type = other RNA
ggacatgatcttctttataatt

SEQ ID NO: 746 - RNA, 22 nt, synthetic construct
  source 1..22: mol_type = other RNA
ggagacagcactcaaagtagaa

SEQ ID NO: 747 - RNA, 22 nt, synthetic construct
  source 1..22: mol_type = other RNA
ggagcaacctgctcagatacat

SEQ ID NO: 748 - RNA, 22 nt, synthetic construct
  source 1..22: mol_type = other RNA
ggatgaattccaaattctgctt

SEQ ID NO: 749 - RNA, 22 nt, synthetic construct
  source 1..22: mol_type = other RNA
ggattggatgaattccaaattc

SEQ ID NO: 750 - RNA, 22 nt, synthetic construct
  source 1..22: mol_type = other RNA
gggttataataatgttaacatg

SEQ ID NO: 751 - RNA, 22 nt, synthetic construct
  source 1..22: mol_type = other RNA
ggttataataatgttaacatgg

SEQ ID NO: 752 - RNA, 22 nt, synthetic construct
  source 1..22: mol_type = other RNA
gtaagtgtataagcatatcaat

SEQ ID NO: 753 - RNA, 22 nt, synthetic construct
  source 1..22: mol_type = other RNA
gtagggttataataatgttaac

SEQ ID NO: 754 - RNA, 22 nt, synthetic construct
  source 1..22: mol_type = other RNA
gtatctgagcaggttgctccac

SEQ ID NO: 755 - RNA, 22 nt, synthetic construct
  source 1..22: mol_type = other RNA
gtctccatgtttgatgtatctg

SEQ ID NO: 756 - RNA, 22 nt, synthetic construct
  source 1..22: mol_type = other RNA
gtgcataaagtgtaagtgtata

SEQ ID NO: 757 - RNA, 22 nt, synthetic construct
  source 1..22: mol_type = other RNA
gtgctgtctccatgtttgatgt

SEQ ID NO: 758 - RNA, 22 nt, synthetic construct
  source 1..22: mol_type = other RNA
gtggagcaacctgctcagatac

SEQ ID NO: 759 - RNA, 22 nt, synthetic construct
  source 1..22: mol_type = other RNA
gtgtaagtgtataagcatatca

SEQ ID NO: 760 - RNA, 22 nt, synthetic construct
  source 1..22: mol_type = other RNA
gttaacatggacatgatcttct

SEQ ID NO: 761 - RNA, 22 nt, synthetic construct
  source 1..22: mol_type = other RNA
gttaacattattataaccctac

SEQ ID NO: 762 - RNA, 22 nt, synthetic construct
  source 1..22: mol_type = other RNA
gtttgaagatgccgcatttgga

SEQ ID NO: 763 - RNA, 22 nt, synthetic construct
  source 1..22: mol_type = other RNA
gtttgatgtatctgagcaggtt

SEQ ID NO: 764 - RNA, 22 nt, synthetic construct
  source 1..22: mol_type = other RNA
taaaaagcaagcaagcagaatt

SEQ ID NO: 765 - RNA, 22 nt, synthetic construct
  source 1..22: mol_type = other RNA
taaagaagatcatgtccatgtt

SEQ ID NO: 766 - RNA, 22 nt, synthetic construct
  source 1..22: mol_type = other RNA
taaagtgtaagtgtataagcat

SEQ ID NO: 767 - RNA, 22 nt, synthetic construct
  source 1..22: mol_type = other RNA
taacatggacatgatcttcttt

SEQ ID NO: 768 - RNA, 22 nt, synthetic construct
  source 1..22: mol_type = other RNA
taaccctacattttgtgcataa

SEQ ID NO: 769 - RNA, 22 nt, synthetic construct
  source 1..22: mol_type = other RNA
taataatgttaacatggacatg

SEQ ID NO: 770 - RNA, 22 nt, synthetic construct
  source 1..22: mol_type = other RNA
taatgttaacatggacatgatc

SEQ ID NO: 771 - RNA, 22 nt, synthetic construct
  source 1..22: mol_type = other RNA
taattctactttgagtgctgtc

SEQ ID NO: 772 - RNA, 22 nt, synthetic construct
  source 1..22: mol_type = other RNA
tacacttacactttatgcacaa

SEQ ID NO: 773 - RNA, 22 nt, synthetic construct
  source 1..22: mol_type = other RNA
tacactttatgcacaaaatgta

SEQ ID NO: 774 - RNA, 22 nt, synthetic construct
  source 1..22: mol_type = other RNA
tacatcaaacatggagacagca

SEQ ID NO: 775 - RNA, 22 nt, synthetic construct
  source 1..22: mol_type = other RNA
tacattttgtgcataaagtgta

SEQ ID NO: 776 - RNA, 22 nt, synthetic construct
  source 1..22: mol_type = other RNA
tacctgtggagcaacctgctca

SEQ ID NO: 777 - RNA, 22 nt, synthetic construct
  source 1..22: mol_type = other RNA
tactttgagtgctgtctccatg

SEQ ID NO: 778 - RNA, 22 nt, synthetic construct
  source 1..22: mol_type = other RNA
tagagctacctgtggagcaacc

SEQ ID NO: 779 - RNA, 22 nt, synthetic construct
  source 1..22: mol_type = other RNA
tataaagaagatcatgtccatg

SEQ ID NO: 780 - RNA, 22 nt, synthetic construct
  source 1..22: mol_type = other RNA
tataaccctacattttgtgcat

SEQ ID NO: 781 - RNA, 22 nt, synthetic construct
  source 1..22: mol_type = other RNA
tataattctactttgagtgctg

SEQ ID NO: 782 - RNA, 22 nt, synthetic construct
  source 1..22: mol_type = other RNA
tatacacttacactttatgcac

SEQ ID NO: 783 - RNA, 22 nt, synthetic construct
  source 1..22: mol_type = other RNA
tatctgagcaggttgctccaca

SEQ ID NO: 784 - RNA, 22 nt, synthetic construct
  source 1..22: mol_type = other RNA
tatgcacaaaatgtagggttat

SEQ ID NO: 785 - RNA, 22 nt, synthetic construct
  source 1..22: mol_type = other RNA
tatgcttatacacttacacttt

SEQ ID NO: 786 - RNA, 22 nt, synthetic construct
  source 1..22: mol_type = other RNA
tattaaaaagcaagcaagcaga

SEQ ID NO: 787 - RNA, 22 nt, synthetic construct
  source 1..22: mol_type = other RNA
tattataaccctacattttgtg

SEQ ID NO: 788 - RNA, 22 nt, synthetic construct
  source 1..22: mol_type = other RNA
tcaaacatggagacagcactca

SEQ ID NO: 789 - RNA, 22 nt, synthetic construct
  source 1..22: mol_type = other RNA
tcaatattaaaaagcaagcaag

SEQ ID NO: 790 - RNA, 22 nt, synthetic construct
  source 1..22: mol_type = other RNA
tcagatacatcaaacatggaga

SEQ ID NO: 791 - RNA, 22 nt, synthetic construct
  source 1..22: mol_type = other RNA
tcatccaatccaaatgcggcat

SEQ ID NO: 792 - RNA, 22 nt, synthetic construct
  source 1..22: mol_type = other RNA
tcatgtccatgttaacattatt

SEQ ID NO: 793 - RNA, 22 nt, synthetic construct
  source 1..22: mol_type = other RNA
tccaaattctgcttgcttgctt

SEQ ID NO: 794 - RNA, 22 nt, synthetic construct
  source 1..22: mol_type = other RNA
tccatgtttgatgtatctgagc

SEQ ID NO: 795 - RNA, 22 nt, synthetic construct
  source 1..22: mol_type = other RNA
tctactttgagtgctgtctcca

SEQ ID NO: 796 - RNA, 22 nt, synthetic construct
  source 1..22: mol_type = other RNA
tctccatgtttgatgtatctga

SEQ ID NO: 797 - RNA, 22 nt, synthetic construct
  source 1..22: mol_type = other RNA
tctgagcaggttgctccacagg

SEQ ID NO: 798 - RNA, 22 nt, synthetic construct
  source 1..22: mol_type = other RNA
tctgcttgcttgctttttaata

SEQ ID NO: 799 - RNA, 22 nt, synthetic construct
  source 1..22: mol_type = other RNA
tgaagatgccgcatttggattg

SEQ ID NO: 800 - RNA, 22 nt, synthetic construct
  source 1..22: mol_type = other RNA
tgaattccaaattctgcttgct

SEQ ID NO: 801 - RNA, 22 nt, synthetic construct
  source 1..22: mol_type = other RNA
tgagtgctgtctccatgtttga

SEQ ID NO: 802 - RNA, 22 nt, synthetic construct
  source 1..22: mol_type = other RNA
tgatatgcttatacacttacac

SEQ ID NO: 803 - RNA, 22 nt, synthetic construct
  source 1..22: mol_type = other RNA
tgatgtatctgagcaggttgct

SEQ ID NO: 804 - RNA, 22 nt, synthetic construct
  source 1..22: mol_type = other RNA
tgcacaaaatgtagggttataa

SEQ ID NO: 805 - RNA, 22 nt, synthetic construct
  source 1..22: mol_type = other RNA
tgcataaagtgtaagtgtataa

SEQ ID NO: 806 - RNA, 22 nt, synthetic construct
  source 1..22: mol_type = other RNA
tgccgcatttggattggatgaa

SEQ ID NO: 807 - RNA, 22 nt, synthetic construct
  source 1..22: mol_type = other RNA
tgctcagatacatcaaacatgg

SEQ ID NO: 808 - RNA, 22 nt, synthetic construct
  source 1..22: mol_type = other RNA
tgctgtctccatgtttgatgta

SEQ ID NO: 809 - RNA, 22 nt, synthetic construct
  source 1..22: mol_type = other RNA
tgcttatacacttacactttat

SEQ ID NO: 810 - RNA, 22 nt, synthetic construct
  source 1..22: mol_type = other RNA
tgcttgcttgctttttaatatt

SEQ ID NO: 811 - RNA, 22 nt, synthetic construct
  source 1..22: mol_type = other RNA
tggaattcatccaatccaaatg

SEQ ID NO: 812 - RNA, 22 nt, synthetic construct
  source 1..22: mol_type = other RNA
tggacatgatcttctttataat

SEQ ID NO: 813 - RNA, 22 nt, synthetic construct
  source 1..22: mol_type = other RNA
tggagacagcactcaaagtaga

SEQ ID NO: 814 - RNA, 22 nt, synthetic construct
  source 1..22: mol_type = other RNA
tggagcaacctgctcagataca

SEQ ID NO: 815 - RNA, 22 nt, synthetic construct
  source 1..22: mol_type = other RNA
tggatgaattccaaattctgct

SEQ ID NO: 816 - RNA, 22 nt, synthetic construct
  source 1..22: mol_type = other RNA
tggattggatgaattccaaatt

SEQ ID NO: 817 - RNA, 22 nt, synthetic construct
  source 1..22: mol_type = other RNA
tgtaagtgtataagcatatcaa

SEQ ID NO: 818 - RNA, 22 nt, synthetic construct
  source 1..22: mol_type = other RNA
tgtatctgagcaggttgctcca

SEQ ID NO: 819 - RNA, 22 nt, synthetic construct
  source 1..22: mol_type = other RNA
tgtctccatgtttgatgtatct

SEQ ID NO: 820 - RNA, 22 nt, synthetic construct
  source 1..22: mol_type = other RNA
tgtgcataaagtgtaagtgtat

SEQ ID NO: 821 - RNA, 22 nt, synthetic construct
  source 1..22: mol_type = other RNA
tgtggagcaacctgctcagata

SEQ ID NO: 822 - RNA, 22 nt, synthetic construct
  source 1..22: mol_type = other RNA
tgttaacatggacatgatcttc

SEQ ID NO: 823 - RNA, 22 nt, synthetic construct
  source 1..22: mol_type = other RNA
tgtttgatgtatctgagcaggt

SEQ ID NO: 824 - RNA, 22 nt, synthetic construct
  source 1..22: mol_type = other RNA
ttaaaaagcaagcaagcagaat

SEQ ID NO: 825 - RNA, 22 nt, synthetic construct
  source 1..22: mol_type = other RNA
ttaacatggacatgatcttctt

SEQ ID NO: 826 - RNA, 22 nt, synthetic construct
  source 1..22: mol_type = other RNA
ttacactttatgcacaaaatgt

SEQ ID NO: 827 - RNA, 22 nt, synthetic construct
  source 1..22: mol_type = other RNA
ttataaagaagatcatgtccat

SEQ ID NO: 828 - RNA, 22 nt, synthetic construct
  source 1..22: mol_type = other RNA
ttataaccctacattttgtgca

SEQ ID NO: 829 - RNA, 22 nt, synthetic construct
  source 1..22: mol_type = other RNA
ttataattctactttgagtgct

SEQ ID NO: 830 - RNA, 22 nt, synthetic construct
  source 1..22: mol_type = other RNA
ttatacacttacactttatgca

SEQ ID NO: 831 - RNA, 22 nt, synthetic construct
  source 1..22: mol_type = other RNA
ttatgcacaaaatgtagggtta

SEQ ID NO: 832 - RNA, 22 nt, synthetic construct
  source 1..22: mol_type = other RNA
ttcatccaatccaaatgcggca

SEQ ID NO: 833 - RNA, 22 nt, synthetic construct
  source 1..22: mol_type = other RNA
ttccaaattctgcttgcttgct

SEQ ID NO: 834 - RNA, 22 nt, synthetic construct
  source 1..22: mol_type = other RNA
ttctactttgagtgctgtctcc

SEQ ID NO: 835 - RNA, 22 nt, synthetic construct
  source 1..22: mol_type = other RNA
ttctgcttgcttgctttttaat

SEQ ID NO: 836 - RNA, 22 nt, synthetic construct
  source 1..22: mol_type = other RNA
ttgaagatgccgcatttggatt

SEQ ID NO: 837 - RNA, 22 nt, synthetic construct
  source 1..22: mol_type = other RNA
ttgagtgctgtctccatgtttg

SEQ ID NO: 838 - RNA, 22 nt, synthetic construct
  source 1..22: mol_type = other RNA
ttgatatgcttatacacttaca

SEQ ID NO: 839 - RNA, 22 nt, synthetic construct
  source 1..22: mol_type = other RNA
ttgatgtatctgagcaggttgc

SEQ ID NO: 840 - RNA, 22 nt, synthetic construct
  source 1..22: mol_type = other RNA
ttggaattcatccaatccaaat

SEQ ID NO: 841 - RNA, 22 nt, synthetic construct
  source 1..22: mol_type = other RNA
ttggatgaattccaaattctgc

SEQ ID NO: 842 - RNA, 22 nt, synthetic construct
  source 1..22: mol_type = other RNA
ttggattggatgaattccaaat

SEQ ID NO: 843 - RNA, 22 nt, synthetic construct
  source 1..22: mol_type = other RNA
ttgtgcataaagtgtaagtgta

SEQ ID NO: 844 - RNA, 22 nt, synthetic construct
  source 1..22: mol_type = other RNA
tttataattctactttgagtgc

SEQ ID NO: 845 - RNA, 22 nt, synthetic construct
  source 1..22: mol_type = other RNA
tttatgcacaaaatgtagggtt

SEQ ID NO: 846 - RNA, 22 nt, synthetic construct
  source 1..22: mol_type = other RNA
tttgaagatgccgcatttggat

SEQ ID NO: 847 - RNA, 22 nt, synthetic construct
  source 1..22: mol_type = other RNA
tttgagtgctgtctccatgttt

SEQ ID NO: 848 - RNA, 22 nt, synthetic construct
  source 1..22: mol_type = other RNA
tttgatgtatctgagcaggttg

SEQ ID NO: 849 - RNA, 22 nt, synthetic construct
  source 1..22: mol_type = other RNA
tttggaattcatccaatccaaa

SEQ ID NO: 850 - RNA, 22 nt, synthetic construct
  source 1..22: mol_type = other RNA
tttggattggatgaattccaaa

SEQ ID NO: 851 - RNA, 22 nt, synthetic construct
  source 1..22: mol_type = other RNA
tttgtgcataaagtgtaagtgt

SEQ ID NO: 852 - RNA, 22 nt, synthetic construct
  source 1..22: mol_type = other RNA
ttttgtgcataaagtgtaagtg

SEQ ID NO: 853 - RNA, 20 nt, synthetic construct
  source 1..20: mol_type = other RNA
aaaaataaaccagattaacc

SEQ ID NO: 854 - RNA, 20 nt, synthetic construct
  source 1..20: mol_type = other RNA
aaaataaaccagattaacca

SEQ ID NO: 855 - RNA, 20 nt, synthetic construct
  source 1..20: mol_type = other RNA
aaaccagattaaccacaacc

SEQ ID NO: 856 - RNA, 20 nt, synthetic construct
  source 1..20: mol_type = other RNA
aaagcttgttaagatagtta

SEQ ID NO: 857 - RNA, 20 nt, synthetic construct
  source 1..20: mol_type = other RNA
aaagtaaggcatggttgtgg

SEQ ID NO: 858 - RNA, 20 nt, synthetic construct
  source 1..20: mol_type = other RNA
aaataaaccagattaaccac

SEQ ID NO: 859 - RNA, 20 nt, synthetic construct
  source 1..20: mol_type = other RNA
aaatctgaccaagatgttga

SEQ ID NO: 860 - RNA, 20 nt, synthetic construct
  source 1..20: mol_type = other RNA
aaattctaagcagagtatgt

SEQ ID NO: 861 - RNA, 20 nt, synthetic construct
  source 1..20: mol_type = other RNA
aaattggaagttaacttatg

SEQ ID NO: 862 - RNA, 20 nt, synthetic construct
  source 1..20: mol_type = other RNA
aaatttccaataatcctgtc

SEQ ID NO: 863 - RNA, 20 nt, synthetic construct
  source 1..20: mol_type = other RNA
aaattttcccccaaattcta

SEQ ID NO: 864 - RNA, 20 nt, synthetic construct
  source 1..20: mol_type = other RNA
aacaaatttccaataatcct

SEQ ID NO: 865 - RNA, 20 nt, synthetic construct
  source 1..20: mol_type = other RNA
aacaagctttgagtgcaaga

SEQ ID NO: 866 - RNA, 20 nt, synthetic construct
  source 1..20: mol_type = other RNA
aacatcaacatcttggtcag

SEQ ID NO: 867 - RNA, 20 nt, synthetic construct
  source 1..20: mol_type = other RNA
aacatcttggtcagatttga

SEQ ID NO: 868 - RNA, 20 nt, synthetic construct
  source 1..20: mol_type = other RNA
aaccacaaccatgccttact

SEQ ID NO: 869 - RNA, 20 nt, synthetic construct
  source 1..20: mol_type = other RNA
aaccagattaaccacaacca

SEQ ID NO: 870 - RNA, 20 nt, synthetic construct
  source 1..20: mol_type = other RNA
aaccatgccttactttatca

SEQ ID NO: 871 - RNA, 20 nt, synthetic construct
  source 1..20: mol_type = other RNA
aactatcttaacaagctttg

SEQ ID NO: 872 - RNA, 20 nt, synthetic construct
  source 1..20: mol_type = other RNA
aactcttcaatctcttgcac

SEQ ID NO: 873 - RNA, 20 nt, synthetic construct
  source 1..20: mol_type = other RNA
aacttatgcacgcttaacta

SEQ ID NO: 874 - RNA, 20 nt, synthetic construct
  source 1..20: mol_type = other RNA
aacttccaatttacatactc

SEQ ID NO: 875 - RNA, 20 nt, synthetic construct
  source 1..20: mol_type = other RNA
aacttgtggaacaaaaataa

SEQ ID NO: 876 - RNA, 20 nt, synthetic construct
  source 1..20: mol_type = other RNA
aagagaattctctgctcccc

SEQ ID NO: 877 - RNA, 20 nt, synthetic construct
  source 1..20: mol_type = other RNA
aagagattgaagagttcaaa

SEQ ID NO: 878 - RNA, 20 nt, synthetic construct
  source 1..20: mol_type = other RNA
aagagttcaaatctgaccaa

SEQ ID NO: 879 - RNA, 20 nt, synthetic construct
  source 1..20: mol_type = other RNA
aagatagttaagcgtgcata

SEQ ID NO: 880 - RNA, 20 nt, synthetic construct
  source 1..20: mol_type = other RNA
aagatgttgatgttggataa

SEQ ID NO: 881 - RNA, 20 nt, synthetic construct
  source 1..20: mol_type = other RNA
aagcagagtatgtaaattgg

SEQ ID NO: 882 - RNA, 20 nt, synthetic construct
  source 1..20: mol_type = other RNA
aagcgtgcataagttaactt

SEQ ID NO: 883 - RNA, 20 nt, synthetic construct
  source 1..20: mol_type = other RNA
aagcttgttaagatagttaa

SEQ ID NO: 884 - RNA, 20 nt, synthetic construct
  source 1..20: mol_type = other RNA
aagctttgagtgcaagagat

SEQ ID NO: 885 - RNA, 20 nt, synthetic construct
  source 1..20: mol_type = other RNA
aaggcatggttgtggttaat

SEQ ID NO: 886 - RNA, 20 nt, synthetic construct
  source 1..20: mol_type = other RNA
aagtaaggcatggttgtggt

SEQ ID NO: 887 - RNA, 20 nt, synthetic construct
  source 1..20: mol_type = other RNA
aagttaacttatgcacgctt

SEQ ID NO: 888 - RNA, 20 nt, synthetic construct
  source 1..20: mol_type = other RNA
aagttaacttccaatttaca

SEQ ID NO: 889 - RNA, 20 nt, synthetic construct
  source 1..20: mol_type = other RNA
aataaaccagattaaccaca

SEQ ID NO: 890 - RNA, 20 nt, synthetic construct
  source 1..20: mol_type = other RNA
aatcctgtcaattatatttc

SEQ ID NO: 891 - RNA, 20 nt, synthetic construct
  source 1..20: mol_type = other RNA
aatctcttgcactcaaagct

SEQ ID NO: 892 - RNA, 20 nt, synthetic construct
  source 1..20: mol_type = other RNA
aatctgaccaagatgttgat

SEQ ID NO: 893 - RNA, 20 nt, synthetic construct
  source 1..20: mol_type = other RNA
aatctggtttatttttgttc

SEQ ID NO: 894 - RNA, 20 nt, synthetic construct
  source 1..20: mol_type = other RNA
aatgaatgaaacattttgtc

SEQ ID NO: 895 - RNA, 20 nt, synthetic construct
  source 1..20: mol_type = other RNA
aattctaagcagagtatgta

SEQ ID NO: 896 - RNA, 20 nt, synthetic construct
  source 1..20: mol_type = other RNA
aattctcttatccaacatca

SEQ ID NO: 897 - RNA, 20 nt, synthetic construct
  source 1..20: mol_type = other RNA
aattgacaggattattggaa

SEQ ID NO: 898 - RNA, 20 nt, synthetic construct
  source 1..20: mol_type = other RNA
aattggaagttaacttatgc

SEQ ID NO: 899 - RNA, 20 nt, synthetic construct
  source 1..20: mol_type = other RNA
aatttacatactctgcttag

SEQ ID NO: 900 - RNA, 20 nt, synthetic construct
  source 1..20: mol_type = other RNA
aatttccaataatcctgtca

SEQ ID NO: 901 - RNA, 20 nt, synthetic construct
  source 1..20: mol_type = other RNA
aatttgggggaaaatttaga

SEQ ID NO: 902 - RNA, 20 nt, synthetic construct
  source 1..20: mol_type = other RNA
aattttcccccaaattctaa

SEQ ID NO: 903 - RNA, 20 nt, synthetic construct
  source 1..20: mol_type = other RNA
acaaatttccaataatcctg

SEQ ID NO: 904 - RNA, 20 nt, synthetic construct
  source 1..20: mol_type = other RNA
acaaccatgccttactttat

SEQ ID NO: 905 - RNA, 20 nt, synthetic construct
  source 1..20: mol_type = other RNA
acaagctttgagtgcaagag

SEQ ID NO: 906 - RNA, 20 nt, synthetic construct
  source 1..20: mol_type = other RNA
acaggattattggaaatttg

SEQ ID NO: 907 - RNA, 20 nt, synthetic construct
  source 1..20: mol_type = other RNA
acatactctgcttagaattt

SEQ ID NO: 908 - RNA, 20 nt, synthetic construct
  source 1..20: mol_type = other RNA
acatcaacatcttggtcaga

SEQ ID NO: 909 - RNA, 20 nt, synthetic construct
  source 1..20: mol_type = other RNA
acatcttggtcagatttgaa

SEQ ID NO: 910 - RNA, 20 nt, synthetic construct
  source 1..20: mol_type = other RNA
acatttgataaagtaaggca

SEQ ID NO: 911 - RNA, 20 nt, synthetic construct
  source 1..20: mol_type = other RNA
accaagatgttgatgttgga

SEQ ID NO: 912 - RNA, 20 nt, synthetic construct
  source 1..20: mol_type = other RNA
accacaaccatgccttactt

SEQ ID NO: 913 - RNA, 20 nt, synthetic construct
  source 1..20: mol_type = other RNA
accagattaaccacaaccat

SEQ ID NO: 914 - RNA, 20 nt, synthetic construct
  source 1..20: mol_type = other RNA
accatgccttactttatcaa

SEQ ID NO: 915 - RNA, 20 nt, synthetic construct
  source 1..20: mol_type = other RNA
acgcttaactatcttaacaa

SEQ ID NO: 916 - RNA, 20 nt, synthetic construct
  source 1..20: mol_type = other RNA
actatcttaacaagctttga

SEQ ID NO: 917 - RNA, 20 nt, synthetic construct
  source 1..20: mol_type = other RNA
actcaaagcttgttaagata

SEQ ID NO: 918 - RNA, 20 nt, synthetic construct
  source 1..20: mol_type = other RNA
actctgcttagaatttgggg

SEQ ID NO: 919 - RNA, 20 nt, synthetic construct
  source 1..20: mol_type = other RNA
actcttcaatctcttgcact

SEQ ID NO: 920 - RNA, 20 nt, synthetic construct
  source 1..20: mol_type = other RNA
acttagaggtggggagcaga

SEQ ID NO: 921 - RNA, 20 nt, synthetic construct
  source 1..20: mol_type = other RNA
acttatgcacgcttaactat

SEQ ID NO: 922 - RNA, 20 nt, synthetic construct
  source 1..20: mol_type = other RNA
acttccaatttacatactct

SEQ ID NO: 923 - RNA, 20 nt, synthetic construct
  source 1..20: mol_type = other RNA
acttgtggaacaaaaataaa

SEQ ID NO: 924 - RNA, 20 nt, synthetic construct
  source 1..20: mol_type = other RNA
agaaatataattgacaggat

SEQ ID NO: 925 - RNA, 20 nt, synthetic construct
  source 1..20: mol_type = other RNA
agaattctcttatccaacat

SEQ ID NO: 926 - RNA, 20 nt, synthetic construct
  source 1..20: mol_type = other RNA
agaatttgggggaaaattta

SEQ ID NO: 927 - RNA, 20 nt, synthetic construct
  source 1..20: mol_type = other RNA
agagaattctctgctcccca

SEQ ID NO: 928 - RNA, 20 nt, synthetic construct
  source 1..20: mol_type = other RNA
agagaattctcttatccaac

SEQ ID NO: 929 - RNA, 20 nt, synthetic construct
  source 1..20: mol_type = other RNA
agagattgaagagttcaaat

SEQ ID NO: 930 - RNA, 20 nt, synthetic construct
  source 1..20: mol_type = other RNA
agaggtggggagcagagaat

SEQ ID NO: 931 - RNA, 20 nt, synthetic construct
  source 1..20: mol_type = other RNA
agagtatgtaaattggaagt

SEQ ID NO: 932 - RNA, 20 nt, synthetic construct
  source 1..20: mol_type = other RNA
agagttcaaatctgaccaag

SEQ ID NO: 933 - RNA, 20 nt, synthetic construct
  source 1..20: mol_type = other RNA
agatagttaagcgtgcataa

SEQ ID NO: 934 - RNA, 20 nt, synthetic construct
  source 1..20: mol_type = other RNA
agatgttgatgttggataag

SEQ ID NO: 935 - RNA, 20 nt, synthetic construct
  source 1..20: mol_type = other RNA
agattaaccacaaccatgcc

SEQ ID NO: 936 - RNA, 20 nt, synthetic construct
  source 1..20: mol_type = other RNA
agattgaagagttcaaatct

SEQ ID NO: 937 - RNA, 20 nt, synthetic construct
  source 1..20: mol_type = other RNA
agatttgaactcttcaatct

SEQ ID NO: 938 - RNA, 20 nt, synthetic construct
  source 1..20: mol_type = other RNA
agcagagaattctcttatcc

SEQ ID NO: 939 - RNA, 20 nt, synthetic construct
  source 1..20: mol_type = other RNA
agcagagtatgtaaattgga

SEQ ID NO: 940 - RNA, 20 nt, synthetic construct
  source 1..20: mol_type = other RNA
agcgtgcataagttaacttc

SEQ ID NO: 941 - RNA, 20 nt, synthetic construct
  source 1..20: mol_type = other RNA
agcttgttaagatagttaag

SEQ ID NO: 942 - RNA, 20 nt, synthetic construct
  source 1..20: mol_type = other RNA
agctttgagtgcaagagatt

SEQ ID NO: 943 - RNA, 20 nt, synthetic construct
  source 1..20: mol_type = other RNA
aggattattggaaatttgtt

SEQ ID NO: 944 - RNA, 20 nt, synthetic construct
  source 1..20: mol_type = other RNA
aggcatggttgtggttaatc

SEQ ID NO: 945 - RNA, 20 nt, synthetic construct
  source 1..20: mol_type = other RNA
aggtggggagcagagaattc

SEQ ID NO: 946 - RNA, 20 nt, synthetic construct
  source 1..20: mol_type = other RNA
agtaaggcatggttgtggtt

SEQ ID NO: 947 - RNA, 20 nt, synthetic construct
  source 1..20: mol_type = other RNA
agtatgtaaattggaagtta

SEQ ID NO: 948 - RNA, 20 nt, synthetic construct
  source 1..20: mol_type = other RNA
agtgcaagagattgaagagt

SEQ ID NO: 949 - RNA, 20 nt, synthetic construct
  source 1..20: mol_type = other RNA
agttaacttatgcacgctta

SEQ ID NO: 950 - RNA, 20 nt, synthetic construct
  source 1..20: mol_type = other RNA
agttaacttccaatttacat

SEQ ID NO: 951 - RNA, 20 nt, synthetic construct
  source 1..20: mol_type = other RNA
agttaagcgtgcataagtta

SEQ ID NO: 952 - RNA, 20 nt, synthetic construct
  source 1..20: mol_type = other RNA
agttcaaatctgaccaagat

SEQ ID NO: 953 - RNA, 20 nt, synthetic construct
  source 1..20: mol_type = other RNA
ataaaccagattaaccacaa

SEQ ID NO: 954 - RNA, 20 nt, synthetic construct
  source 1..20: mol_type = other RNA
ataaagtaaggcatggttgt

SEQ ID NO: 955 - RNA, 20 nt, synthetic construct
  source 1..20: mol_type = other RNA
ataagagaattctctgctcc

SEQ ID NO: 956 - RNA, 20 nt, synthetic construct
  source 1..20: mol_type = other RNA
ataattgacaggattattgg

SEQ ID NO: 957 - RNA, 20 nt, synthetic construct
  source 1..20: mol_type = other RNA
atacatttgataaagtaagg

SEQ ID NO: 958 - RNA, 20 nt, synthetic construct
  source 1..20: mol_type = other RNA
atactctgcttagaatttgg

SEQ ID NO: 959 - RNA, 20 nt, synthetic construct
  source 1..20: mol_type = other RNA
atagttaagcgtgcataagt

SEQ ID NO: 960 - RNA, 20 nt, synthetic construct
  source 1..20: mol_type = other RNA
atatttctaaattttccccc

SEQ ID NO: 961 - RNA, 20 nt, synthetic construct
  source 1..20: mol_type = other RNA
atcaacatcttggtcagatt

SEQ ID NO: 962 - RNA, 20 nt, synthetic construct
  source 1..20: mol_type = other RNA
atccaacatcaacatcttgg

SEQ ID NO: 963 - RNA, 20 nt, synthetic construct
  source 1..20: mol_type = other RNA
atcctgtcaattatatttct

SEQ ID NO: 964 - RNA, 20 nt, synthetic construct
  source 1..20: mol_type = other RNA
atctcttgcactcaaagctt

SEQ ID NO: 965 - RNA, 20 nt, synthetic construct
  source 1..20: mol_type = other RNA
atctgaccaagatgttgatg

SEQ ID NO: 966 - RNA, 20 nt, synthetic construct
  source 1..20: mol_type = other RNA
atctggtttatttttgttcc

SEQ ID NO: 967 - RNA, 20 nt, synthetic construct
  source 1..20: mol_type = other RNA
atcttaacaagctttgagtg

SEQ ID NO: 968 - RNA, 20 nt, synthetic construct
  source 1..20: mol_type = other RNA
atcttggtcagatttgaact

SEQ ID NO: 969 - RNA, 20 nt, synthetic construct
  source 1..20: mol_type = other RNA
atgaatgaaacattttgtca

SEQ ID NO: 970 - RNA, 20 nt, synthetic construct
  source 1..20: mol_type = other RNA
atgacaaaatgtttcattca

SEQ ID NO: 971 - RNA, 20 nt, synthetic construct
  source 1..20: mol_type = other RNA
atgatttatttaacttgtgg

SEQ ID NO: 972 - RNA, 20 nt, synthetic construct
  source 1..20: mol_type = other RNA
atgcacgcttaactatctta

SEQ ID NO: 973 - RNA, 20 nt, synthetic construct
  source 1..20: mol_type = other RNA
atgccttactttatcaaatg

SEQ ID NO: 974 - RNA, 20 nt, synthetic construct
  source 1..20: mol_type = other RNA
atggttgtggttaatctggt

SEQ ID NO: 975 - RNA, 20 nt, synthetic construct
  source 1..20: mol_type = other RNA
atgtaaattggaagttaact

SEQ ID NO: 976 - RNA, 20 nt, synthetic construct
  source 1..20: mol_type = other RNA
atgttgatgttggataagag

SEQ ID NO: 977 - RNA, 20 nt, synthetic construct
  source 1..20: mol_type = other RNA
atgttggataagagaattct

SEQ ID NO: 978 - RNA, 20 nt, synthetic construct
  source 1..20: mol_type = other RNA
attaaccacaaccatgcctt

SEQ ID NO: 979 - RNA, 20 nt, synthetic construct
  source 1..20: mol_type = other RNA
attctaagcagagtatgtaa

SEQ ID NO: 980 - RNA, 20 nt, synthetic construct
  source 1..20: mol_type = other RNA
attctcttatccaacatcaa

SEQ ID NO: 981 - RNA, 20 nt, synthetic construct
  source 1..20: mol_type = other RNA
attgaagagttcaaatctga

SEQ ID NO: 982 - RNA, 20 nt, synthetic construct
  source 1..20: mol_type = other RNA
attgacaggattattggaaa

SEQ ID NO: 983 - RNA, 20 nt, synthetic construct
  source 1..20: mol_type = other RNA
attggaagttaacttatgca

SEQ ID NO: 984 - RNA, 20 nt, synthetic construct
  source 1..20: mol_type = other RNA
atttaacttgtggaacaaaa

SEQ ID NO: 985 - RNA, 20 nt, synthetic construct
  source 1..20: mol_type = other RNA
atttacatactctgcttaga

SEQ ID NO: 986 - RNA, 20 nt, synthetic construct
  source 1..20: mol_type = other RNA
atttatttaacttgtggaac

SEQ ID NO: 987 - RNA, 20 nt, synthetic construct
  source 1..20: mol_type = other RNA
atttccaataatcctgtcaa

SEQ ID NO: 988 - RNA, 20 nt, synthetic construct
  source 1..20: mol_type = other RNA
atttctaaattttcccccaa

SEQ ID NO: 989 - RNA, 20 nt, synthetic construct
  source 1..20: mol_type = other RNA
atttgaactcttcaatctct

SEQ ID NO: 990 - RNA, 20 nt, synthetic construct
  source 1..20: mol_type = other RNA
atttgataaagtaaggcatg

SEQ ID NO: 991 - RNA, 20 nt, synthetic construct
  source 1..20: mol_type = other RNA
atttgggggaaaatttagaa

SEQ ID NO: 992 - RNA, 20 nt, synthetic construct
  source 1..20: mol_type = other RNA
attttcccccaaattctaag

SEQ ID NO: 993 - RNA, 20 nt, synthetic construct
  source 1..20: mol_type = other RNA
atttttgttccacaagttaa

SEQ ID NO: 994 - RNA, 20 nt, synthetic construct
  source 1..20: mol_type = other RNA
caaaaataaaccagattaac

SEQ ID NO: 995 - RNA, 20 nt, synthetic construct
  source 1..20: mol_type = other RNA
caaagcttgttaagatagtt

SEQ ID NO: 996 - RNA, 20 nt, synthetic construct
  source 1..20: mol_type = other RNA
caaatctgaccaagatgttg

SEQ ID NO: 997 - RNA, 20 nt, synthetic construct
  source 1..20: mol_type = other RNA
caaattctaagcagagtatg

SEQ ID NO: 998 - RNA, 20 nt, synthetic construct
  source 1..20: mol_type = other RNA
caaatttccaataatcctgt

SEQ ID NO: 999 - RNA, 20 nt, synthetic construct
  source 1..20: mol_type = other RNA
caacatcaacatcttggtca

SEQ ID NO: 1000 - RNA, 20 nt, synthetic construct
  source 1..20: mol_type = other RNA
caacatcttggtcagatttg

SEQ ID NO: 1001 - RNA, 20 nt, synthetic construct
  source 1..20: mol_type = other RNA
caaccatgccttactttatc

SEQ ID NO: 1002 - RNA, 20 nt, synthetic construct
  source 1..20: mol_type = other RNA
caagagattgaagagttcaa

SEQ ID NO: 1003 - RNA, 20 nt, synthetic construct
  source 1..20: mol_type = other RNA
caagatgttgatgttggata

SEQ ID NO: 1004 - RNA, 20 nt, synthetic construct
  source 1..20: mol_type = other RNA
caagctttgagtgcaagaga

SEQ ID NO: 1005 - RNA, 20 nt, synthetic construct
  source 1..20: mol_type = other RNA
caataatcctgtcaattata

SEQ ID NO: 1006 - RNA, 20 nt, synthetic construct
  source 1..20: mol_type = other RNA
caatctcttgcactcaaagc

SEQ ID NO: 1007 - RNA, 20 nt, synthetic construct
  source 1..20: mol_type = other RNA
caatttacatactctgctta

SEQ ID NO: 1008 - RNA, 20 nt, synthetic construct
  source 1..20: mol_type = other RNA
cacaaccatgccttacttta

SEQ ID NO: 1009 - RNA, 20 nt, synthetic construct
  source 1..20: mol_type = other RNA
cacgcttaactatcttaaca

SEQ ID NO: 1010 - RNA, 20 nt, synthetic construct
  source 1..20: mol_type = other RNA
cactcaaagcttgttaagat

SEQ ID NO: 1011 - RNA, 20 nt, synthetic construct
  source 1..20: mol_type = other RNA
cagagaattctcttatccaa

SEQ ID NO: 1012 - RNA, 20 nt, synthetic construct
  source 1..20: mol_type = other RNA
cagagtatgtaaattggaag

SEQ ID NO: 1013 - RNA, 20 nt, synthetic construct
  source 1..20: mol_type = other RNA
cagattaaccacaaccatgc

SEQ ID NO: 1014 - RNA, 20 nt, synthetic construct
  source 1..20: mol_type = other RNA
cagatttgaactcttcaatc

SEQ ID NO: 1015 - RNA, 20 nt, synthetic construct
  source 1..20: mol_type = other RNA
caggattattggaaatttgt

SEQ ID NO: 1016 - RNA, 20 nt, synthetic construct
  source 1..20: mol_type = other RNA
cataagttaacttccaattt

SEQ ID NO: 1017 - RNA, 20 nt, synthetic construct
  source 1..20: mol_type = other RNA
catactctgcttagaatttg

SEQ ID NO: 1018 - RNA, 20 nt, synthetic construct
  source 1..20: mol_type = other RNA
catcaacatcttggtcagat

SEQ ID NO: 1019 - RNA, 20 nt, synthetic construct
  source 1..20: mol_type = other RNA
catcttggtcagatttgaac

SEQ ID NO: 1020 - RNA, 20 nt, synthetic construct
  source 1..20: mol_type = other RNA
catgccttactttatcaaat

SEQ ID NO: 1021 - RNA, 20 nt, synthetic construct
  source 1..20: mol_type = other RNA
catggttgtggttaatctgg

SEQ ID NO: 1022 - RNA, 20 nt, synthetic construct
  source 1..20: mol_type = other RNA
catttgataaagtaaggcat

SEQ ID NO: 1023 - RNA, 20 nt, synthetic construct
  source 1..20: mol_type = other RNA
cattttgtcatataagattc

SEQ ID NO: 1024 - RNA, 20 nt, synthetic construct
  source 1..20: mol_type = other RNA
ccaaattctaagcagagtat

SEQ ID NO: 1025 - RNA, 20 nt, synthetic construct
  source 1..20: mol_type = other RNA
ccaacatcaacatcttggtc

SEQ ID NO: 1026 - RNA, 20 nt, synthetic construct
  source 1..20: mol_type = other RNA
ccaagatgttgatgttggat

SEQ ID NO: 1027 - RNA, 20 nt, synthetic construct
  source 1..20: mol_type = other RNA
ccaataatcctgtcaattat

SEQ ID NO: 1028 - RNA, 20 nt, synthetic construct
  source 1..20: mol_type = other RNA
ccaatttacatactctgctt

SEQ ID NO: 1029 - RNA, 20 nt, synthetic construct
  source 1..20: mol_type = other RNA
ccacaaccatgccttacttt

SEQ ID NO: 1030 - RNA, 20 nt, synthetic construct
  source 1..20: mol_type = other RNA
ccacaagttaaataaatcat

SEQ ID NO: 1031 - RNA, 20 nt, synthetic construct
  source 1..20: mol_type = other RNA
ccagattaaccacaaccatg

SEQ ID NO: 1032 - RNA, 20 nt, synthetic construct
  source 1..20: mol_type = other RNA
ccatgccttactttatcaaa

SEQ ID NO: 1033 - RNA, 20 nt, synthetic construct
  source 1..20: mol_type = other RNA
cccaaattctaagcagagta

SEQ ID NO: 1034 - RNA, 20 nt, synthetic construct
  source 1..20: mol_type = other RNA
ccccaaattctaagcagagt

SEQ ID NO: 1035 - RNA, 20 nt, synthetic construct
  source 1..20: mol_type = other RNA
cccccaaattctaagcagag

SEQ ID NO: 1036 - RNA, 20 nt, synthetic construct
  source 1..20: mol_type = other RNA
cctgtcaattatatttctaa

SEQ ID NO: 1037 - RNA, 20 nt, synthetic construct
  source 1..20: mol_type = other RNA
ccttactttatcaaatgtat

SEQ ID NO: 1038 - RNA, 20 nt, synthetic construct
  source 1..20: mol_type = other RNA
cgcttaactatcttaacaag

SEQ ID NO: 1039 - RNA, 20 nt, synthetic construct
  source 1..20: mol_type = other RNA
cgtgcataagttaacttcca

SEQ ID NO: 1040 - RNA, 20 nt, synthetic construct
  source 1..20: mol_type = other RNA
ctaaattttcccccaaattc

SEQ ID NO: 1041 - RNA, 20 nt, synthetic construct
  source 1..20: mol_type = other RNA
ctaagcagagtatgtaaatt

SEQ ID NO: 1042 - RNA, 20 nt, synthetic construct
  source 1..20: mol_type = other RNA
ctatcttaacaagctttgag

SEQ ID NO: 1043 - RNA, 20 nt, synthetic construct
  source 1..20: mol_type = other RNA
ctcaaagcttgttaagatag

SEQ ID NO: 1044 - RNA, 20 nt, synthetic construct
  source 1..20: mol_type = other RNA
ctctgcttagaatttggggg

SEQ ID NO: 1045 - RNA, 20 nt, synthetic construct
  source 1..20: mol_type = other RNA
ctcttatccaacatcaacat

SEQ ID NO: 1046 - RNA, 20 nt, synthetic construct
  source 1..20: mol_type = other RNA
ctcttcaatctcttgcactc

SEQ ID NO: 1047 - RNA, 20 nt, synthetic construct
  source 1..20: mol_type = other RNA
ctcttgcactcaaagcttgt

SEQ ID NO: 1048 - RNA, 20 nt, synthetic construct
  source 1..20: mol_type = other RNA
ctgaccaagatgttgatgtt

SEQ ID NO: 1049 - RNA, 20 nt, synthetic construct
  source 1..20: mol_type = other RNA
ctgcttagaatttgggggaa

SEQ ID NO: 1050 - RNA, 20 nt, synthetic construct
  source 1..20: mol_type = other RNA
ctggtttatttttgttccac

SEQ ID NO: 1051 - RNA, 20 nt, synthetic construct
  source 1..20: mol_type = other RNA
cttaacaagctttgagtgca

SEQ ID NO: 1052 - RNA, 20 nt, synthetic construct
  source 1..20: mol_type = other RNA
cttaactatcttaacaagct

SEQ ID NO: 1053 - RNA, 20 nt, synthetic construct
  source 1..20: mol_type = other RNA
cttagaatttgggggaaaat

SEQ ID NO: 1054 - RNA, 20 nt, synthetic construct
  source 1..20: mol_type = other RNA
cttagaggtggggagcagag

SEQ ID NO: 1055 - RNA, 20 nt, synthetic construct
  source 1..20: mol_type = other RNA
cttatatgacaaaatgtttc

SEQ ID NO: 1056 - RNA, 20 nt, synthetic construct
  source 1..20: mol_type = other RNA
cttatccaacatcaacatct

SEQ ID NO: 1057 - RNA, 20 nt, synthetic construct
  source 1..20: mol_type = other RNA
cttatgcacgcttaactatc

SEQ ID NO: 1058 - RNA, 20 nt, synthetic construct
  source 1..20: mol_type = other RNA
cttcaatctcttgcactcaa

SEQ ID NO: 1059 - RNA, 20 nt, synthetic construct
  source 1..20: mol_type = other RNA
cttccaatttacatactctg

SEQ ID NO: 1060 - RNA, 20 nt, synthetic construct
  source 1..20: mol_type = other RNA
cttgcactcaaagcttgtta

SEQ ID NO: 1061 - RNA, 20 nt, synthetic construct
  source 1..20: mol_type = other RNA
cttggtcagatttgaactct

SEQ ID NO: 1062 - RNA, 20 nt, synthetic construct
  source 1..20: mol_type = other RNA
cttgtggaacaaaaataaac

SEQ ID NO: 1063 - RNA, 20 nt, synthetic construct
  source 1..20: mol_type = other RNA
cttgttaagatagttaagcg

SEQ ID NO: 1064 - RNA, 20 nt, synthetic construct
  source 1..20: mol_type = other RNA
ctttgagtgcaagagattga

SEQ ID NO: 1065 - RNA, 20 nt, synthetic construct
  source 1..20: mol_type = other RNA
gaaacattttgtcatataag

SEQ ID NO: 1066 - RNA, 20 nt, synthetic construct
  source 1..20: mol_type = other RNA
gaaatataattgacaggatt

SEQ ID NO: 1067 - RNA, 20 nt, synthetic construct
  source 1..20: mol_type = other RNA
gaacaaaaataaaccagatt

SEQ ID NO: 1068 - RNA, 20 nt, synthetic construct
  source 1..20: mol_type = other RNA
gaactcttcaatctcttgca

SEQ ID NO: 1069 - RNA, 20 nt, synthetic construct
  source 1..20: mol_type = other RNA
gaagagttcaaatctgacca

SEQ ID NO: 1070 - RNA, 20 nt, synthetic construct
  source 1..20: mol_type = other RNA
gaagttaacttatgcacgct

SEQ ID NO: 1071 - RNA, 20 nt, synthetic construct
  source 1..20: mol_type = other RNA
gaatcttatatgacaaaatg

SEQ ID NO: 1072 - RNA, 20 nt, synthetic construct
  source 1..20: mol_type = other RNA
gaatgaaacattttgtcata

SEQ ID NO: 1073 - RNA, 20 nt, synthetic construct
  source 1..20: mol_type = other RNA
gaattctcttatccaacatc

SEQ ID NO: 1074 - RNA, 20 nt, synthetic construct
  source 1..20: mol_type = other RNA
gaatttgggggaaaatttag

SEQ ID NO: 1075 - RNA, 20 nt, synthetic construct
  source 1..20: mol_type = other RNA
gacaaaatgtttcattcatt

SEQ ID NO: 1076 - RNA, 20 nt, synthetic construct
  source 1..20: mol_type = other RNA
gacaggattattggaaattt

SEQ ID NO: 1077 - RNA, 20 nt, synthetic construct
  source 1..20: mol_type = other RNA
gaccaagatgttgatgttgg

SEQ ID NO: 1078 - RNA, 20 nt, synthetic construct
  source 1..20: mol_type = other RNA
gagaattctctgctccccac

SEQ ID NO: 1079 - RNA, 20 nt, synthetic construct
  source 1..20: mol_type = other RNA
gagaattctcttatccaaca

SEQ ID NO: 1080 - RNA, 20 nt, synthetic construct
  source 1..20: mol_type = other RNA
gagattgaagagttcaaatc

SEQ ID NO: 1081 - RNA, 20 nt, synthetic construct
  source 1..20: mol_type = other RNA
gagcagagaattctcttatc

SEQ ID NO: 1082 - RNA, 20 nt, synthetic construct
  source 1..20: mol_type = other RNA
gaggtggggagcagagaatt

SEQ ID NO: 1083 - RNA, 20 nt, synthetic construct
  source 1..20: mol_type = other RNA
gagtatgtaaattggaagtt

SEQ ID NO: 1084 - RNA, 20 nt, synthetic construct
  source 1..20: mol_type = other RNA
gagtgcaagagattgaagag

SEQ ID NO: 1085 - RNA, 20 nt, synthetic construct
  source 1..20: mol_type = other RNA
gagttcaaatctgaccaaga

SEQ ID NO: 1086 - RNA, 20 nt, synthetic construct
  source 1..20: mol_type = other RNA
gataaagtaaggcatggttg

SEQ ID NO: 1087 - RNA, 20 nt, synthetic construct
  source 1..20: mol_type = other RNA
gataagagaattctctgctc

SEQ ID NO: 1088 - RNA, 20 nt, synthetic construct
  source 1..20: mol_type = other RNA
gatagttaagcgtgcataag

SEQ ID NO: 1089 - RNA, 20 nt, synthetic construct
  source 1..20: mol_type = other RNA
gatgttgatgttggataaga

SEQ ID NO: 1090 - RNA, 20 nt, synthetic construct
  source 1..20: mol_type = other RNA
gatgttggataagagaattc

SEQ ID NO: 1091 - RNA, 20 nt, synthetic construct
  source 1..20: mol_type = other RNA
gattaaccacaaccatgcct

SEQ ID NO: 1092 - RNA, 20 nt, synthetic construct
  source 1..20: mol_type = other RNA
gattgaagagttcaaatctg

SEQ ID NO: 1093 - RNA, 20 nt, synthetic construct
  source 1..20: mol_type = other RNA
gatttatttaacttgtggaa

SEQ ID NO: 1094 - RNA, 20 nt, synthetic construct
  source 1..20: mol_type = other RNA
gatttgaactcttcaatctc

SEQ ID NO: 1095 - RNA, 20 nt, synthetic construct
  source 1..20: mol_type = other RNA
gcaagagattgaagagttca

SEQ ID NO: 1096 - RNA, 20 nt, synthetic construct
  source 1..20: mol_type = other RNA
gcacgcttaactatcttaac

SEQ ID NO: 1097 - RNA, 20 nt, synthetic construct
  source 1..20: mol_type = other RNA
gcactcaaagcttgttaaga

SEQ ID NO: 1098 - RNA, 20 nt, synthetic construct
  source 1..20: mol_type = other RNA
gcagagaattctcttatcca

SEQ ID NO: 1099 - RNA, 20 nt, synthetic construct
  source 1..20: mol_type = other RNA
gcagagtatgtaaattggaa

SEQ ID NO: 1100 - RNA, 20 nt, synthetic construct
  source 1..20: mol_type = other RNA
gcataagttaacttccaatt

SEQ ID NO: 1101 - RNA, 20 nt, synthetic construct
  source 1..20: mol_type = other RNA
gcatggttgtggttaatctg

SEQ ID NO: 1102 - RNA, 20 nt, synthetic construct
  source 1..20: mol_type = other RNA
gccttactttatcaaatgta

SEQ ID NO: 1103 - RNA, 20 nt, synthetic construct
  source 1..20: mol_type = other RNA
gcgtgcataagttaacttcc

SEQ ID NO: 1104 - RNA, 20 nt, synthetic construct
  source 1..20: mol_type = other RNA
gcttaactatcttaacaagc

SEQ ID NO: 1105 - RNA, 20 nt, synthetic construct
  source 1..20: mol_type = other RNA
gcttagaatttgggggaaaa

SEQ ID NO: 1106 - RNA, 20 nt, synthetic construct
  source 1..20: mol_type = other RNA
gcttgttaagatagttaagc

SEQ ID NO: 1107 - RNA, 20 nt, synthetic construct
  source 1..20: mol_type = other RNA
gctttgagtgcaagagattg

SEQ ID NO: 1108 - RNA, 20 nt, synthetic construct
  source 1..20: mol_type = other RNA
ggaacaaaaataaaccagat

SEQ ID NO: 1109 - RNA, 20 nt, synthetic construct
  source 1..20: mol_type = other RNA
ggaagttaacttatgcacgc

SEQ ID NO: 1110 - RNA, 20 nt, synthetic construct
  source 1..20: mol_type = other RNA
ggagcagagaattctcttat

SEQ ID NO: 1111 - RNA, 20 nt, synthetic construct
  source 1..20: mol_type = other RNA
ggataagagaattctctgct

SEQ ID NO: 1112 - RNA, 20 nt, synthetic construct
  source 1..20: mol_type = other RNA
ggattattggaaatttgtta

SEQ ID NO: 1113 - RNA, 20 nt, synthetic construct
  source 1..20: mol_type = other RNA
ggcatggttgtggttaatct

SEQ ID NO: 1114 - RNA, 20 nt, synthetic construct
  source 1..20: mol_type = other RNA
gggagcagagaattctctta

SEQ ID NO: 1115 - RNA, 20 nt, synthetic construct
  source 1..20: mol_type = other RNA
ggggaaaatttagaaatata

SEQ ID NO: 1116 - RNA, 20 nt, synthetic construct
  source 1..20: mol_type = other RNA
ggggagcagagaattctctt

SEQ ID NO: 1117 - RNA, 20 nt, synthetic construct
  source 1..20: mol_type = other RNA
gggggaaaatttagaaatat

SEQ ID NO: 1118 - RNA, 20 nt, synthetic construct
  source 1..20: mol_type = other RNA
ggtcagatttgaactcttca

SEQ ID NO: 1119 - RNA, 20 nt, synthetic construct
  source 1..20: mol_type = other RNA
ggtggggagcagagaattct

SEQ ID NO: 1120 - RNA, 20 nt, synthetic construct
  source 1..20: mol_type = other RNA
ggttaatctggtttattttt

SEQ ID NO: 1121 - RNA, 20 nt, synthetic construct
  source 1..20: mol_type = other RNA
ggttgtggttaatctggttt

SEQ ID NO: 1122 - RNA, 20 nt, synthetic construct
  source 1..20: mol_type = other RNA
ggtttatttttgttccacaa

SEQ ID NO: 1123 - RNA, 20 nt, synthetic construct
  source 1..20: mol_type = other RNA
gtaaattggaagttaactta

SEQ ID NO: 1124 - RNA, 20 nt, synthetic construct
  source 1..20: mol_type = other RNA
gtaaggcatggttgtggtta

SEQ ID NO: 1125 - RNA, 20 nt, synthetic construct
  source 1..20: mol_type = other RNA
gtatgtaaattggaagttaa

SEQ ID NO: 1126 - RNA, 20 nt, synthetic construct
  source 1..20: mol_type = other RNA
gtcagatttgaactcttcaa

SEQ ID NO: 1127 - RNA, 20 nt, synthetic construct
  source 1..20: mol_type = other RNA
gtgcaagagattgaagagtt

SEQ ID NO: 1128 - RNA, 20 nt, synthetic construct
  source 1..20: mol_type = other RNA
gtgcataagttaacttccaa

SEQ ID NO: 1129 - RNA, 20 nt, synthetic construct
  source 1..20: mol_type = other RNA
gtggaacaaaaataaaccag

SEQ ID NO: 1130 - RNA, 20 nt, synthetic construct
  source 1..20: mol_type = other RNA
gtggggagcagagaattctc

SEQ ID NO: 1131 - RNA, 20 nt, synthetic construct
  source 1..20: mol_type = other RNA
gtggttaatctggtttattt

SEQ ID NO: 1132 - RNA, 20 nt, synthetic construct
  source 1..20: mol_type = other RNA
gttaacttatgcacgcttaa

SEQ ID NO: 1133 - RNA, 20 nt, synthetic construct
  source 1..20: mol_type = other RNA
gttaacttccaatttacata

SEQ ID NO: 1134 - RNA, 20 nt, synthetic construct
  source 1..20: mol_type = other RNA
gttaagatagttaagcgtgc

SEQ ID NO: 1135 - RNA, 20 nt, synthetic construct
  source 1..20: mol_type = other RNA
gttaagcgtgcataagttaa

SEQ ID NO: 1136 - RNA, 20 nt, synthetic construct
  source 1..20: mol_type = other RNA
gttaatctggtttatttttg

SEQ ID NO: 1137 - RNA, 20 nt, synthetic construct
  source 1..20: mol_type = other RNA
gttcaaatctgaccaagatg

SEQ ID NO: 1138 - RNA, 20 nt, synthetic construct
  source 1..20: mol_type = other RNA
gttccacaagttaaataaat

SEQ ID NO: 1139 - RNA, 20 nt, synthetic construct
  source 1..20: mol_type = other RNA
gttgatgttggataagagaa

SEQ ID NO: 1140 - RNA, 20 nt, synthetic construct
  source 1..20: mol_type = other RNA
gttggataagagaattctct

SEQ ID NO: 1141 - RNA, 20 nt, synthetic construct
  source 1..20: mol_type = other RNA
gttgtggttaatctggttta

SEQ ID NO: 1142 - RNA, 20 nt, synthetic construct
  source 1..20: mol_type = other RNA
gtttatttttgttccacaag

SEQ ID NO: 1143 - RNA, 20 nt, synthetic construct
  source 1..20: mol_type = other RNA
taaaccagattaaccacaac

SEQ ID NO: 1144 - RNA, 20 nt, synthetic construct
  source 1..20: mol_type = other RNA
taaagtaaggcatggttgtg

SEQ ID NO: 1145 - RNA, 20 nt, synthetic construct
  source 1..20: mol_type = other RNA
taaattttcccccaaattct

SEQ ID NO: 1146 - RNA, 20 nt, synthetic construct
  source 1..20: mol_type = other RNA
taacaaatttccaataatcc

SEQ ID NO: 1147 - RNA, 20 nt, synthetic construct
  source 1..20: mol_type = other RNA
taacaagctttgagtgcaag

SEQ ID NO: 1148 - RNA, 20 nt, synthetic construct
  source 1..20: mol_type = other RNA
taaccacaaccatgccttac

SEQ ID NO: 1149 - RNA, 20 nt, synthetic construct
  source 1..20: mol_type = other RNA
taactatcttaacaagcttt

SEQ ID NO: 1150 - RNA, 20 nt, synthetic construct
  source 1..20: mol_type = other RNA
taacttatgcacgcttaact

SEQ ID NO: 1151 - RNA, 20 nt, synthetic construct
  source 1..20: mol_type = other RNA
taacttccaatttacatact

SEQ ID NO: 1152 - RNA, 20 nt, synthetic construct
  source 1..20: mol_type = other RNA
taacttgtggaacaaaaata

SEQ ID NO: 1153 - RNA, 20 nt, synthetic construct
  source 1..20: mol_type = other RNA
taagagaattctctgctccc

SEQ ID NO: 1154 - RNA, 20 nt, synthetic construct
  source 1..20: mol_type = other RNA
taagatagttaagcgtgcat

SEQ ID NO: 1155 - RNA, 20 nt, synthetic construct
  source 1..20: mol_type = other RNA
taagcagagtatgtaaattg

SEQ ID NO: 1156 - RNA, 20 nt, synthetic construct
  source 1..20: mol_type = other RNA
taagcgtgcataagttaact

SEQ ID NO: 1157 - RNA, 20 nt, synthetic construct
  source 1..20: mol_type = other RNA
taaggcatggttgtggttaa

SEQ ID NO: 1158 - RNA, 20 nt, synthetic construct
  source 1..20: mol_type = other RNA
taagttaacttccaatttac

SEQ ID NO: 1159 - RNA, 20 nt, synthetic construct
  source 1..20: mol_type = other RNA
taattgacaggattattgga

SEQ ID NO: 1160 - RNA, 20 nt, synthetic construct
  source 1..20: mol_type = other RNA
tacatactctgcttagaatt

SEQ ID NO: 1161 - RNA, 20 nt, synthetic construct
  source 1..20: mol_type = other RNA
tacatttgataaagtaaggc

SEQ ID NO: 1162 - RNA, 20 nt, synthetic construct
  source 1..20: mol_type = other RNA
tactctgcttagaatttggg

SEQ ID NO: 1163 - RNA, 20 nt, synthetic construct
  source 1..20: mol_type = other RNA
tagaaatataattgacagga

SEQ ID NO: 1164 - RNA, 20 nt, synthetic construct
  source 1..20: mol_type = other RNA
tagaatttgggggaaaattt

SEQ ID NO: 1165 - RNA, 20 nt, synthetic construct
  source 1..20: mol_type = other RNA
tagaggtggggagcagagaa

SEQ ID NO: 1166 - RNA, 20 nt, synthetic construct
  source 1..20: mol_type = other RNA
tagttaagcgtgcataagtt

SEQ ID NO: 1167 - RNA, 20 nt, synthetic construct
  source 1..20: mol_type = other RNA
tataattgacaggattattg

SEQ ID NO: 1168 - RNA, 20 nt, synthetic construct
  source 1..20: mol_type = other RNA
tatatttctaaattttcccc

SEQ ID NO: 1169 - RNA, 20 nt, synthetic construct
  source 1..20: mol_type = other RNA
tatccaacatcaacatcttg

SEQ ID NO: 1170 - RNA, 20 nt, synthetic construct
  source 1..20: mol_type = other RNA
tatcttaacaagctttgagt

SEQ ID NO: 1171 - RNA, 20 nt, synthetic construct
  source 1..20: mol_type = other RNA
tatgacaaaatgtttcattc

SEQ ID NO: 1172 - RNA, 20 nt, synthetic construct
  source 1..20: mol_type = other RNA
tatgcacgcttaactatctt

SEQ ID NO: 1173 - RNA, 20 nt, synthetic construct
  source 1..20: mol_type = other RNA
tatgtaaattggaagttaac

SEQ ID NO: 1174 - RNA, 20 nt, synthetic construct
  source 1..20: mol_type = other RNA
tatttaacttgtggaacaaa

SEQ ID NO: 1175 - RNA, 20 nt, synthetic construct
  source 1..20: mol_type = other RNA
tatttctaaattttccccca

SEQ ID NO: 1176 - RNA, 20 nt, synthetic construct
  source 1..20: mol_type = other RNA
tatttttgttccacaagtta

SEQ ID NO: 1177 - RNA, 20 nt, synthetic construct
  source 1..20: mol_type = other RNA
tcaaagcttgttaagatagt

SEQ ID NO: 1178 - RNA, 20 nt, synthetic construct
  source 1..20: mol_type = other RNA
tcaaatctgaccaagatgtt

SEQ ID NO: 1179 - RNA, 20 nt, synthetic construct
  source 1..20: mol_type = other RNA
tcaacatcttggtcagattt

SEQ ID NO: 1180 - RNA, 20 nt, synthetic construct
  source 1..20: mol_type = other RNA
tcaatctcttgcactcaaag

SEQ ID NO: 1181 - RNA, 20 nt, synthetic construct
  source 1..20: mol_type = other RNA
tcagatttgaactcttcaat

SEQ ID NO: 1182 - RNA, 20 nt, synthetic construct
  source 1..20: mol_type = other RNA
tccaacatcaacatcttggt

SEQ ID NO: 1183 - RNA, 20 nt, synthetic construct
  source 1..20: mol_type = other RNA
tccaataatcctgtcaatta

SEQ ID NO: 1184 - RNA, 20 nt, synthetic construct
  source 1..20: mol_type = other RNA
tccaatttacatactctgct

SEQ ID NO: 1185 - RNA, 20 nt, synthetic construct
  source 1..20: mol_type = other RNA
tccacaagttaaataaatca

SEQ ID NO: 1186 - RNA, 20 nt, synthetic construct
  source 1..20: mol_type = other RNA
tcccccaaattctaagcaga

SEQ ID NO: 1187 - RNA, 20 nt, synthetic construct
  source 1..20: mol_type = other RNA
tcctgtcaattatatttcta

SEQ ID NO: 1188 - RNA, 20 nt, synthetic construct
  source 1..20: mol_type = other RNA
tctaaattttcccccaaatt

SEQ ID NO: 1189 - RNA, 20 nt, synthetic construct
  source 1..20: mol_type = other RNA
tctaagcagagtatgtaaat

SEQ ID NO: 1190 - RNA, 20 nt, synthetic construct
  source 1..20: mol_type = other RNA
tctcttatccaacatcaaca

SEQ ID NO: 1191 - RNA, 20 nt, synthetic construct
  source 1..20: mol_type = other RNA
tctcttgcactcaaagcttg

SEQ ID NO: 1192 - RNA, 20 nt, synthetic construct
  source 1..20: mol_type = other RNA
tctgaccaagatgttgatgt

SEQ ID NO: 1193 - RNA, 20 nt, synthetic construct
  source 1..20: mol_type = other RNA
tctgcttagaatttggggga

SEQ ID NO: 1194 - RNA, 20 nt, synthetic construct
  source 1..20: mol_type = other RNA
tctggtttatttttgttcca

SEQ ID NO: 1195 - RNA, 20 nt, synthetic construct
  source 1..20: mol_type = other RNA
tcttaacaagctttgagtgc

SEQ ID NO: 1196 - RNA, 20 nt, synthetic construct
  source 1..20: mol_type = other RNA
tcttatccaacatcaacatc

SEQ ID NO: 1197 - RNA, 20 nt, synthetic construct
  source 1..20: mol_type = other RNA
tcttcaatctcttgcactca

SEQ ID NO: 1198 - RNA, 20 nt, synthetic construct
  source 1..20: mol_type = other RNA
tcttgcactcaaagcttgtt

SEQ ID NO: 1199 - RNA, 20 nt, synthetic construct
  source 1..20: mol_type = other RNA
tcttggtcagatttgaactc

SEQ ID NO: 1200 - RNA, 20 nt, synthetic construct
  source 1..20: mol_type = other RNA
tgaactcttcaatctcttgc

SEQ ID NO: 1201 - RNA, 20 nt, synthetic construct
  source 1..20: mol_type = other RNA
tgaagagttcaaatctgacc

SEQ ID NO: 1202 - RNA, 20 nt, synthetic construct
  source 1..20: mol_type = other RNA
tgaatgaaacattttgtcat

SEQ ID NO: 1203 - RNA, 20 nt, synthetic construct
  source 1..20: mol_type = other RNA
tgacaaaatgtttcattcat

SEQ ID NO: 1204 - RNA, 20 nt, synthetic construct
  source 1..20: mol_type = other RNA
tgacaggattattggaaatt

SEQ ID NO: 1205 - RNA, 20 nt, synthetic construct
  source 1..20: mol_type = other RNA
tgaccaagatgttgatgttg

SEQ ID NO: 1206 - RNA, 20 nt, synthetic construct
  source 1..20: mol_type = other RNA
tgagtgcaagagattgaaga

SEQ ID NO: 1207 - RNA, 20 nt, synthetic construct
  source 1..20: mol_type = other RNA
tgataaagtaaggcatggtt

SEQ ID NO: 1208 - RNA, 20 nt, synthetic construct
  source 1..20: mol_type = other RNA
tgatgttggataagagaatt

SEQ ID NO: 1209 - RNA, 20 nt, synthetic construct
  source 1..20: mol_type = other RNA
tgatttatttaacttgtgga

SEQ ID NO: 1210 - RNA, 20 nt, synthetic construct
  source 1..20: mol_type = other RNA
tgcaagagattgaagagttc

SEQ ID NO: 1211 - RNA, 20 nt, synthetic construct
  source 1..20: mol_type = other RNA
tgcacgcttaactatcttaa

SEQ ID NO: 1212 - RNA, 20 nt, synthetic construct
  source 1..20: mol_type = other RNA
tgcactcaaagcttgttaag

SEQ ID NO: 1213 - RNA, 20 nt, synthetic construct
  source 1..20: mol_type = other RNA
tgcataagttaacttccaat

SEQ ID NO: 1214 - RNA, 20 nt, synthetic construct
  source 1..20: mol_type = other RNA
tgccttactttatcaaatgt

SEQ ID NO: 1215 - RNA, 20 nt, synthetic construct
  source 1..20: mol_type = other RNA
tgcttagaatttgggggaaa

SEQ ID NO: 1216 - RNA, 20 nt, synthetic construct
  source 1..20: mol_type = other RNA
tggaacaaaaataaaccaga

SEQ ID NO: 1217 - RNA, 20 nt, synthetic construct
  source 1..20: mol_type = other RNA
tggaagttaacttatgcacg

SEQ ID NO: 1218 - RNA, 20 nt, synthetic construct
  source 1..20: mol_type = other RNA
tggataagagaattctctgc

SEQ ID NO: 1219 - RNA, 20 nt, synthetic construct
  source 1..20: mol_type = other RNA
tggggagcagagaattctct

SEQ ID NO: 1220 - RNA, 20 nt, synthetic construct
  source 1..20: mol_type = other RNA
tgggggaaaatttagaaata

SEQ ID NO: 1221 - RNA, 20 nt, synthetic construct
  source 1..20: mol_type = other RNA
tggtcagatttgaactcttc

SEQ ID NO: 1222 - RNA, 20 nt, synthetic construct
  source 1..20: mol_type = other RNA
tggttaatctggtttatttt

SEQ ID NO: 1223 - RNA, 20 nt, synthetic construct
  source 1..20: mol_type = other RNA
tggttgtggttaatctggtt

SEQ ID NO: 1224 - RNA, 20 nt, synthetic construct
  source 1..20: mol_type = other RNA
tggtttatttttgttccaca

SEQ ID NO: 1225 - RNA, 20 nt, synthetic construct
  source 1..20: mol_type = other RNA
tgtaaattggaagttaactt

SEQ ID NO: 1226 - RNA, 20 nt, synthetic construct
  source 1..20: mol_type = other RNA
tgtggaacaaaaataaacca

SEQ ID NO: 1227 - RNA, 20 nt, synthetic construct
  source 1..20: mol_type = other RNA
tgtggttaatctggtttatt

SEQ ID NO: 1228 - RNA, 20 nt, synthetic construct
  source 1..20: mol_type = other RNA
tgttaagatagttaagcgtg

SEQ ID NO: 1229 - RNA, 20 nt, synthetic construct
  source 1..20: mol_type = other RNA
tgttccacaagttaaataaa

SEQ ID NO: 1230 - RNA, 20 nt, synthetic construct
  source 1..20: mol_type = other RNA
tgttgatgttggataagaga

SEQ ID NO: 1231 - RNA, 20 nt, synthetic construct
  source 1..20: mol_type = other RNA
tgttggataagagaattctc

SEQ ID NO: 1232 - RNA, 20 nt, synthetic construct
  source 1..20: mol_type = other RNA
ttaacaagctttgagtgcaa

SEQ ID NO: 1233 - RNA, 20 nt, synthetic construct
  source 1..20: mol_type = other RNA
ttaaccacaaccatgcctta

SEQ ID NO: 1234 - RNA, 20 nt, synthetic construct
  source 1..20: mol_type = other RNA
ttaactatcttaacaagctt

SEQ ID NO: 1235 - RNA, 20 nt, synthetic construct
  source 1..20: mol_type = other RNA
ttaacttatgcacgcttaac

SEQ ID NO: 1236 - RNA, 20 nt, synthetic construct
  source 1..20: mol_type = other RNA
ttaacttccaatttacatac

SEQ ID NO: 1237 - RNA, 20 nt, synthetic construct
  source 1..20: mol_type = other RNA
ttaacttgtggaacaaaaat

SEQ ID NO: 1238 - RNA, 20 nt, synthetic construct
  source 1..20: mol_type = other RNA
ttaagatagttaagcgtgca

SEQ ID NO: 1239 - RNA, 20 nt, synthetic construct
  source 1..20: mol_type = other RNA
ttaagcgtgcataagttaac

SEQ ID NO: 1240 - RNA, 20 nt, synthetic construct
  source 1..20: mol_type = other RNA
ttacatactctgcttagaat

SEQ ID NO: 1241 - RNA, 20 nt, synthetic construct
  source 1..20: mol_type = other RNA
ttagaaatataattgacagg

SEQ ID NO: 1242 - RNA, 20 nt, synthetic construct
  source 1..20: mol_type = other RNA
ttagaatttgggggaaaatt

SEQ ID NO: 1243 - RNA, 20 nt, synthetic construct
  source 1..20: mol_type = other RNA
ttagaggtggggagcagaga

SEQ ID NO: 1244 - RNA, 20 nt, synthetic construct
  source 1..20: mol_type = other RNA
ttatccaacatcaacatctt

SEQ ID NO: 1245 - RNA, 20 nt, synthetic construct
  source 1..20: mol_type = other RNA
ttatgcacgcttaactatct

SEQ ID NO: 1246 - RNA, 20 nt, synthetic construct
  source 1..20: mol_type = other RNA
ttatttaacttgtggaacaa

SEQ ID NO: 1247 - RNA, 20 nt, synthetic construct
  source 1..20: mol_type = other RNA
ttatttttgttccacaagtt

SEQ ID NO: 1248 - RNA, 20 nt, synthetic construct
  source 1..20: mol_type = other RNA
ttcaaatctgaccaagatgt

SEQ ID NO: 1249 - RNA, 20 nt, synthetic construct
  source 1..20: mol_type = other RNA
ttcaatctcttgcactcaaa

SEQ ID NO: 1250 - RNA, 20 nt, synthetic construct
  source 1..20: mol_type = other RNA
ttccaataatcctgtcaatt

SEQ ID NO: 1251 - RNA, 20 nt, synthetic construct
  source 1..20: mol_type = other RNA
ttccaatttacatactctgc

SEQ ID NO: 1252 - RNA, 20 nt, synthetic construct
  source 1..20: mol_type = other RNA
ttccacaagttaaataaatc

SEQ ID NO: 1253 - RNA, 20 nt, synthetic construct
  source 1..20: mol_type = other RNA
ttcccccaaattctaagcag

SEQ ID NO: 1254 - RNA, 20 nt, synthetic construct
  source 1..20: mol_type = other RNA
ttctaaattttcccccaaat

SEQ ID NO: 1255 - RNA, 20 nt, synthetic construct
  source 1..20: mol_type = other RNA
ttctaagcagagtatgtaaa

SEQ ID NO: 1256 - RNA, 20 nt, synthetic construct
  source 1..20: mol_type = other RNA
ttctcttatccaacatcaac

SEQ ID NO: 1257 - RNA, 20 nt, synthetic construct
  source 1..20: mol_type = other RNA
ttgaactcttcaatctcttg

SEQ ID NO: 1258 - RNA, 20 nt, synthetic construct
  source 1..20: mol_type = other RNA
ttgaagagttcaaatctgac

SEQ ID NO: 1259 - RNA, 20 nt, synthetic construct
  source 1..20: mol_type = other RNA
ttgacaggattattggaaat

SEQ ID NO: 1260 - RNA, 20 nt, synthetic construct
  source 1..20: mol_type = other RNA
ttgagtgcaagagattgaag

SEQ ID NO: 1261 - RNA, 20 nt, synthetic construct
  source 1..20: mol_type = other RNA
ttgataaagtaaggcatggt

SEQ ID NO: 1262 - RNA, 20 nt, synthetic construct
  source 1..20: mol_type = other RNA
ttgatgttggataagagaat

SEQ ID NO: 1263 - RNA, 20 nt, synthetic construct
  source 1..20: mol_type = other RNA
ttgcactcaaagcttgttaa

SEQ ID NO: 1264 - RNA, 20 nt, synthetic construct
  source 1..20: mol_type = other RNA
ttggaagttaacttatgcac

SEQ ID NO: 1265 - RNA, 20 nt, synthetic construct
  source 1..20: mol_type = other RNA
ttggataagagaattctctg

SEQ ID NO: 1266 - RNA, 20 nt, synthetic construct
  source 1..20: mol_type = other RNA
ttgggggaaaatttagaaat

SEQ ID NO: 1267 - RNA, 20 nt, synthetic construct
  source 1..20: mol_type = other RNA
ttggtcagatttgaactctt

SEQ ID NO: 1268 - RNA, 20 nt, synthetic construct
  source 1..20: mol_type = other RNA
ttgtggaacaaaaataaacc

SEQ ID NO: 1269 - RNA, 20 nt, synthetic construct
  source 1..20: mol_type = other RNA
ttgtggttaatctggtttat

SEQ ID NO: 1270 - RNA, 20 nt, synthetic construct
  source 1..20: mol_type = other RNA
ttgttaagatagttaagcgt

SEQ ID NO: 1271 - RNA, 20 nt, synthetic construct
  source 1..20: mol_type = other RNA
ttgttccacaagttaaataa

SEQ ID NO: 1272 - RNA, 20 nt, synthetic construct
  source 1..20: mol_type = other RNA
tttaacttgtggaacaaaaa

SEQ ID NO: 1273 - RNA, 20 nt, synthetic construct
  source 1..20: mol_type = other RNA
tttacatactctgcttagaa

SEQ ID NO: 1274 - RNA, 20 nt, synthetic construct
  source 1..20: mol_type = other RNA
tttatttaacttgtggaaca

SEQ ID NO: 1275 - RNA, 20 nt, synthetic construct
  source 1..20: mol_type = other RNA
tttatttttgttccacaagt

SEQ ID NO: 1276 - RNA, 20 nt, synthetic construct
  source 1..20: mol_type = other RNA
tttccaataatcctgtcaat

SEQ ID NO: 1277 - RNA, 20 nt, synthetic construct
  source 1..20: mol_type = other RNA
tttcccccaaattctaagca

SEQ ID NO: 1278 - RNA, 20 nt, synthetic construct
  source 1..20: mol_type = other RNA
tttctaaattttcccccaaa

SEQ ID NO: 1279 - RNA, 20 nt, synthetic construct
  source 1..20: mol_type = other RNA
tttgaactcttcaatctctt

SEQ ID NO: 1280 - RNA, 20 nt, synthetic construct
  source 1..20: mol_type = other RNA
tttgagtgcaagagattgaa

SEQ ID NO: 1281 - RNA, 20 nt, synthetic construct
  source 1..20: mol_type = other RNA
tttgataaagtaaggcatgg

SEQ ID NO: 1282 - RNA, 20 nt, synthetic construct
  source 1..20: mol_type = other RNA
tttgggggaaaatttagaaa

SEQ ID NO: 1283 - RNA, 20 nt, synthetic construct
  source 1..20: mol_type = other RNA
tttgttccacaagttaaata

SEQ ID NO: 1284 - RNA, 20 nt, synthetic construct
  source 1..20: mol_type = other RNA
ttttcccccaaattctaagc

SEQ ID NO: 1285 - RNA, 20 nt, synthetic construct
  source 1..20: mol_type = other RNA
ttttgttccacaagttaaat

SEQ ID NO: 1286 - RNA, 20 nt, synthetic construct
  source 1..20: mol_type = other RNA
tttttgttccacaagttaaa

SEQ ID NO: 1287 - RNA, 21 nt, synthetic construct
  source 1..21: mol_type = other RNA
aaaataaaccagattaaccac

SEQ ID NO: 1288 - RNA, 21 nt, synthetic construct
  source 1..21: mol_type = other RNA
aaaccagattaaccacaacca

SEQ ID NO: 1289 - RNA, 21 nt, synthetic construct
  source 1..21: mol_type = other RNA
aaagtaaggcatggttgtggt

SEQ ID NO: 1290 - RNA, 21 nt, synthetic construct
  source 1..21: mol_type = other RNA
aaataaaccagattaaccaca

SEQ ID NO: 1291 - RNA, 21 nt, synthetic construct
  source 1..21: mol_type = other RNA
aaatctgaccaagatgttgat

SEQ ID NO: 1292 - RNA, 21 nt, synthetic construct
  source 1..21: mol_type = other RNA
aaattctaagcagagtatgta

SEQ ID NO: 1293 - RNA, 21 nt, synthetic construct
  source 1..21: mol_type = other RNA
aaattggaagttaacttatgc

SEQ ID NO: 1294 - RNA, 21 nt, synthetic construct
  source 1..21: mol_type = other RNA
aaatttccaataatcctgtca

SEQ ID NO: 1295 - RNA, 21 nt, synthetic construct
  source 1..21: mol_type = other RNA
aaattttcccccaaattctaa

SEQ ID NO: 1296 - RNA, 21 nt, synthetic construct
  source 1..21: mol_type = other RNA
aacaaatttccaataatcctg

SEQ ID NO: 1297 - RNA, 21 nt, synthetic construct
  source 1..21: mol_type = other RNA
aacaagctttgagtgcaagag

SEQ ID NO: 1298 - RNA, 21 nt, synthetic construct
  source 1..21: mol_type = other RNA
aacatcaacatcttggtcaga

SEQ ID NO: 1299 - RNA, 21 nt, synthetic construct
  source 1..21: mol_type = other RNA
aacatcttggtcagatttgaa

SEQ ID NO: 1300 - RNA, 21 nt, synthetic construct
  source 1..21: mol_type = other RNA
aaccacaaccatgccttactt

SEQ ID NO: 1301 - RNA, 21 nt, synthetic construct
  source 1..21: mol_type = other RNA
aaccagattaaccacaaccat

SEQ ID NO: 1302 - RNA, 21 nt, synthetic construct
  source 1..21: mol_type = other RNA
aaccatgccttactttatcaa

SEQ ID NO: 1303 - RNA, 21 nt, synthetic construct
  source 1..21: mol_type = other RNA
aactatcttaacaagctttga

SEQ ID NO: 1304 - RNA, 21 nt, synthetic construct
  source 1..21: mol_type = other RNA
aactcttcaatctcttgcact

SEQ ID NO: 1305 - RNA, 21 nt, synthetic construct
  source 1..21: mol_type = other RNA
aacttatgcacgcttaactat

SEQ ID NO: 1306 - RNA, 21 nt, synthetic construct
  source 1..21: mol_type = other RNA
aacttccaatttacatactct

SEQ ID NO: 1307 - RNA, 21 nt, synthetic construct
  source 1..21: mol_type = other RNA
aagagaattctctgctcccca

SEQ ID NO: 1308 - RNA, 21 nt, synthetic construct
  source 1..21: mol_type = other RNA
aagagattgaagagttcaaat

SEQ ID NO: 1309 - RNA, 21 nt, synthetic construct
  source 1..21: mol_type = other RNA
aagagttcaaatctgaccaag

SEQ ID NO: 1310 - RNA, 21 nt, synthetic construct
  source 1..21: mol_type = other RNA
aagatagttaagcgtgcataa

SEQ ID NO: 1311 - RNA, 21 nt, synthetic construct
  source 1..21: mol_type = other RNA
aagatgttgatgttggataag

SEQ ID NO: 1312 - RNA, 21 nt, synthetic construct
  source 1..21: mol_type = other RNA
aagcagagtatgtaaattgga

SEQ ID NO: 1313 - RNA, 21 nt, synthetic construct
  source 1..21: mol_type = other RNA
aagcgtgcataagttaacttc

SEQ ID NO: 1314 - RNA, 21 nt, synthetic construct
  source 1..21: mol_type = other RNA
aagcttgttaagatagttaag

SEQ ID NO: 1315 - RNA, 21 nt, synthetic construct
  source 1..21: mol_type = other RNA
aagctttgagtgcaagagatt

SEQ ID NO: 1316 - RNA, 21 nt, synthetic construct
  source 1..21: mol_type = other RNA
aaggcatggttgtggttaatc

SEQ ID NO: 1317 - RNA, 21 nt, synthetic construct
  source 1..21: mol_type = other RNA
aagtaaggcatggttgtggtt

SEQ ID NO: 1318 - RNA, 21 nt, synthetic construct
  source 1..21: mol_type = other RNA
aagttaacttatgcacgctta

SEQ ID NO: 1319 - RNA, 21 nt, synthetic construct
  source 1..21: mol_type = other RNA
aataaaccagattaaccacaa

SEQ ID NO: 1320 - RNA, 21 nt, synthetic construct
  source 1..21: mol_type = other RNA
aatctcttgcactcaaagctt

SEQ ID NO: 1321 - RNA, 21 nt, synthetic construct
  source 1..21: mol_type = other RNA
aatctgaccaagatgttgatg

SEQ ID NO: 1322 - RNA, 21 nt, synthetic construct
  source 1..21: mol_type = other RNA
aatctggtttatttttgttcc

SEQ ID NO: 1323 - RNA, 21 nt, synthetic construct
  source 1..21: mol_type = other RNA
aattctaagcagagtatgtaa

SEQ ID NO: 1324 - RNA, 21 nt, synthetic construct
  source 1..21: mol_type = other RNA
aattctcttatccaacatcaa

SEQ ID NO: 1325 - RNA, 21 nt, synthetic construct
  source 1..21: mol_type = other RNA
aattgacaggattattggaaa

SEQ ID NO: 1326 - RNA, 21 nt, synthetic construct
  source 1..21: mol_type = other RNA
aattggaagttaacttatgca

SEQ ID NO: 1327 - RNA, 21 nt, synthetic construct
  source 1..21: mol_type = other RNA
aatttacatactctgcttaga

SEQ ID NO: 1328 - RNA, 21 nt, synthetic construct
  source 1..21: mol_type = other RNA
aatttccaataatcctgtcaa

SEQ ID NO: 1329 - RNA, 21 nt, synthetic construct
  source 1..21: mol_type = other RNA
aatttgggggaaaatttagaa

SEQ ID NO: 1330 - RNA, 21 nt, synthetic construct
  source 1..21: mol_type = other RNA
aattttcccccaaattctaag

SEQ ID NO: 1331 - RNA, 21 nt, synthetic construct
  source 1..21: mol_type = other RNA
acaaatttccaataatcctgt

SEQ ID NO: 1332 - RNA, 21 nt, synthetic construct
  source 1..21: mol_type = other RNA
acaaccatgccttactttatc

SEQ ID NO: 1333 - RNA, 21 nt, synthetic construct
  source 1..21: mol_type = other RNA
acaagctttgagtgcaagaga

SEQ ID NO: 1334 - RNA, 21 nt, synthetic construct
  source 1..21: mol_type = other RNA
acaggattattggaaatttgt

SEQ ID NO: 1335 - RNA, 21 nt, synthetic construct
  source 1..21: mol_type = other RNA
acatactctgcttagaatttg

SEQ ID NO: 1336 - RNA, 21 nt, synthetic construct
  source 1..21: mol_type = other RNA
acatcaacatcttggtcagat

SEQ ID NO: 1337 - RNA, 21 nt, synthetic construct
  source 1..21: mol_type = other RNA
acatcttggtcagatttgaac

SEQ ID NO: 1338 - RNA, 21 nt, synthetic construct
  source 1..21: mol_type = other RNA
acatttgataaagtaaggcat

SEQ ID NO: 1339 - RNA, 21 nt, synthetic construct
  source 1..21: mol_type = other RNA
accaagatgttgatgttggat

SEQ ID NO: 1340 - RNA, 21 nt, synthetic construct
  source 1..21: mol_type = other RNA
accacaaccatgccttacttt

SEQ ID NO: 1341 - RNA, 21 nt, synthetic construct
  source 1..21: mol_type = other RNA
accagattaaccacaaccatg

SEQ ID NO: 1342 - RNA, 21 nt, synthetic construct
  source 1..21: mol_type = other RNA
accatgccttactttatcaaa

SEQ ID NO: 1343 - RNA, 21 nt, synthetic construct
  source 1..21: mol_type = other RNA
acgcttaactatcttaacaag

SEQ ID NO: 1344 - RNA, 21 nt, synthetic construct
  source 1..21: mol_type = other RNA
actatcttaacaagctttgag

SEQ ID NO: 1345 - RNA, 21 nt, synthetic construct
  source 1..21: mol_type = other RNA
actcaaagcttgttaagatag

SEQ ID NO: 1346 - RNA, 21 nt, synthetic construct
  source 1..21: mol_type = other RNA
actctgcttagaatttggggg

SEQ ID NO: 1347 - RNA, 21 nt, synthetic construct
  source 1..21: mol_type = other RNA
actcttcaatctcttgcactc

SEQ ID NO: 1348 - RNA, 21 nt, synthetic construct
  source 1..21: mol_type = other RNA
acttagaggtggggagcagag

SEQ ID NO: 1349 - RNA, 21 nt, synthetic construct
  source 1..21: mol_type = other RNA
acttatgcacgcttaactatc

SEQ ID NO: 1350 - RNA, 21 nt, synthetic construct
  source 1..21: mol_type = other RNA
acttccaatttacatactctg

SEQ ID NO: 1351 - RNA, 21 nt, synthetic construct
  source 1..21: mol_type = other RNA
acttgtggaacaaaaataaac

SEQ ID NO: 1352 - RNA, 21 nt, synthetic construct
  source 1..21: mol_type = other RNA
agaattctcttatccaacatc

SEQ ID NO: 1353 - RNA, 21 nt, synthetic construct
  source 1..21: mol_type = other RNA
agaatttgggggaaaatttag

SEQ ID NO: 1354 - RNA, 21 nt, synthetic construct
  source 1..21: mol_type = other RNA
agagaattctctgctccccac

SEQ ID NO: 1355 - RNA, 21 nt, synthetic construct
  source 1..21: mol_type = other RNA
agagaattctcttatccaaca

SEQ ID NO: 1356 - RNA, 21 nt, synthetic construct
  source 1..21: mol_type = other RNA
agagattgaagagttcaaatc

SEQ ID NO: 1357 - RNA, 21 nt, synthetic construct
  source 1..21: mol_type = other RNA
agaggtggggagcagagaatt

SEQ ID NO: 1358 - RNA, 21 nt, synthetic construct
  source 1..21: mol_type = other RNA
agagtatgtaaattggaagtt

SEQ ID NO: 1359 - RNA, 21 nt, synthetic construct
  source 1..21: mol_type = other RNA
agagttcaaatctgaccaaga

SEQ ID NO: 1360 - RNA, 21 nt, synthetic construct
  source 1..21: mol_type = other RNA
agatagttaagcgtgcataag

SEQ ID NO: 1361 - RNA, 21 nt, synthetic construct
  source 1..21: mol_type = other RNA
agatgttgatgttggataaga

SEQ ID NO: 1362 - RNA, 21 nt, synthetic construct
  source 1..21: mol_type = other RNA
agattaaccacaaccatgcct

SEQ ID NO: 1363 - RNA, 21 nt, synthetic construct
  source 1..21: mol_type = other RNA
agattgaagagttcaaatctg

SEQ ID NO: 1364 - RNA, 21 nt, synthetic construct
  source 1..21: mol_type = other RNA
agatttgaactcttcaatctc

SEQ ID NO: 1365 - RNA, 21 nt, synthetic construct
  source 1..21: mol_type = other RNA
agcagagaattctcttatcca

SEQ ID NO: 1366 - RNA, 21 nt, synthetic construct
  source 1..21: mol_type = other RNA
agcagagtatgtaaattggaa

SEQ ID NO: 1367 - RNA, 21 nt, synthetic construct
  source 1..21: mol_type = other RNA
agcgtgcataagttaacttcc

SEQ ID NO: 1368 - RNA, 21 nt, synthetic construct
  source 1..21: mol_type = other RNA
agcttgttaagatagttaagc

SEQ ID NO: 1369 - RNA, 21 nt, synthetic construct
  source 1..21: mol_type = other RNA
agctttgagtgcaagagattg

SEQ ID NO: 1370 - RNA, 21 nt, synthetic construct
  source 1..21: mol_type = other RNA
aggcatggttgtggttaatct

SEQ ID NO: 1371 - RNA, 21 nt, synthetic construct
  source 1..21: mol_type = other RNA
aggtggggagcagagaattct

SEQ ID NO: 1372 - RNA, 21 nt, synthetic construct
  source 1..21: mol_type = other RNA
agtaaggcatggttgtggtta

SEQ ID NO: 1373 - RNA, 21 nt, synthetic construct
  source 1..21: mol_type = other RNA
agtgcaagagattgaagagtt

SEQ ID NO: 1374 - RNA, 21 nt, synthetic construct
  source 1..21: mol_type = other RNA
agttaacttatgcacgcttaa

SEQ ID NO: 1375 - RNA, 21 nt, synthetic construct
  source 1..21: mol_type = other RNA
agttaagcgtgcataagttaa

SEQ ID NO: 1376 - RNA, 21 nt, synthetic construct
  source 1..21: mol_type = other RNA
agttcaaatctgaccaagatg

SEQ ID NO: 1377 - RNA, 21 nt, synthetic construct
  source 1..21: mol_type = other RNA
ataaaccagattaaccacaac

SEQ ID NO: 1378 - RNA, 21 nt, synthetic construct
  source 1..21: mol_type = other RNA
ataaagtaaggcatggttgtg

SEQ ID NO: 1379 - RNA, 21 nt, synthetic construct
  source 1..21: mol_type = other RNA
ataagagaattctctgctccc

SEQ ID NO: 1380 - RNA, 21 nt, synthetic construct
  source 1..21: mol_type = other RNA
ataattgacaggattattgga

SEQ ID NO: 1381 - RNA, 21 nt, synthetic construct
  source 1..21: mol_type = other RNA
atacatttgataaagtaaggc

SEQ ID NO: 1382 - RNA, 21 nt, synthetic construct
  source 1..21: mol_type = other RNA
atactctgcttagaatttggg

SEQ ID NO: 1383 - RNA, 21 nt, synthetic construct
  source 1..21: mol_type = other RNA
atagttaagcgtgcataagtt

SEQ ID NO: 1384 - RNA, 21 nt, synthetic construct
  source 1..21: mol_type = other RNA
atatttctaaattttccccca

SEQ ID NO: 1385 - RNA, 21 nt, synthetic construct
  source 1..21: mol_type = other RNA
atcaacatcttggtcagattt

SEQ ID NO: 1386 - RNA, 21 nt, synthetic construct
  source 1..21: mol_type = other RNA
atccaacatcaacatcttggt

SEQ ID NO: 1387 - RNA, 21 nt, synthetic construct
  source 1..21: mol_type = other RNA
atctcttgcactcaaagcttg

SEQ ID NO: 1388 - RNA, 21 nt, synthetic construct
  source 1..21: mol_type = other RNA
atctgaccaagatgttgatgt

SEQ ID NO: 1389 - RNA, 21 nt, synthetic construct
  source 1..21: mol_type = other RNA
atctggtttatttttgttcca

SEQ ID NO: 1390 - RNA, 21 nt, synthetic construct
  source 1..21: mol_type = other RNA
atcttaacaagctttgagtgc

SEQ ID NO: 1391 - RNA, 21 nt, synthetic construct
  source 1..21: mol_type = other RNA
atcttggtcagatttgaactc

SEQ ID NO: 1392 - RNA, 21 nt, synthetic construct
  source 1..21: mol_type = other RNA
atgcacgcttaactatcttaa

SEQ ID NO: 1393 - RNA, 21 nt, synthetic construct
  source 1..21: mol_type = other RNA
atgccttactttatcaaatgt

SEQ ID NO: 1394 - RNA, 21 nt, synthetic construct
  source 1..21: mol_type = other RNA
atggttgtggttaatctggtt

SEQ ID NO: 1395 - RNA, 21 nt, synthetic construct
  source 1..21: mol_type = other RNA
atgttgatgttggataagaga

SEQ ID NO: 1396 - RNA, 21 nt, synthetic construct
  source 1..21: mol_type = other RNA
atgttggataagagaattctc

SEQ ID NO: 1397 - RNA, 21 nt, synthetic construct
  source 1..21: mol_type = other RNA
attaaccacaaccatgcctta

SEQ ID NO: 1398 - RNA, 21 nt, synthetic construct
  source 1..21: mol_type = other RNA
attctaagcagagtatgtaaa

SEQ ID NO: 1399 - RNA, 21 nt, synthetic construct
  source 1..21: mol_type = other RNA
attctcttatccaacatcaac

SEQ ID NO: 1400 - RNA, 21 nt, synthetic construct
  source 1..21: mol_type = other RNA
attgaagagttcaaatctgac

SEQ ID NO: 1401 - RNA, 21 nt, synthetic construct
  source 1..21: mol_type = other RNA
attgacaggattattggaaat

SEQ ID NO: 1402 - RNA, 21 nt, synthetic construct
  source 1..21: mol_type = other RNA
attggaagttaacttatgcac

SEQ ID NO: 1403 - RNA, 21 nt, synthetic construct
  source 1..21: mol_type = other RNA
atttacatactctgcttagaa

SEQ ID NO: 1404 - RNA, 21 nt, synthetic construct
  source 1..21: mol_type = other RNA
atttccaataatcctgtcaat

SEQ ID NO: 1405 - RNA, 21 nt, synthetic construct
  source 1..21: mol_type = other RNA
atttctaaattttcccccaaa

SEQ ID NO: 1406 - RNA, 21 nt, synthetic construct
  source 1..21: mol_type = other RNA
atttgaactcttcaatctctt

SEQ ID NO: 1407 - RNA, 21 nt, synthetic construct
  source 1..21: mol_type = other RNA
atttgataaagtaaggcatgg

SEQ ID NO: 1408 - RNA, 21 nt, synthetic construct
  source 1..21: mol_type = other RNA
atttgggggaaaatttagaaa

SEQ ID NO: 1409 - RNA, 21 nt, synthetic construct
  source 1..21: mol_type = other RNA
attttcccccaaattctaagc

SEQ ID NO: 1410 - RNA, 21 nt, synthetic construct
  source 1..21: mol_type = other RNA
caaaaataaaccagattaacc

SEQ ID NO: 1411 - RNA, 21 nt, synthetic construct
  source 1..21: mol_type = other RNA
caaagcttgttaagatagtta

SEQ ID NO: 1412 - RNA, 21 nt, synthetic construct
  source 1..21: mol_type = other RNA
caaatctgaccaagatgttga

SEQ ID NO: 1413 - RNA, 21 nt, synthetic construct
  source 1..21: mol_type = other RNA
caaattctaagcagagtatgt

SEQ ID NO: 1414 - RNA, 21 nt, synthetic construct
  source 1..21: mol_type = other RNA
caaatttccaataatcctgtc

SEQ ID NO: 1415 - RNA, 21 nt, synthetic construct
  source 1..21: mol_type = other RNA
caacatcaacatcttggtcag

SEQ ID NO: 1416 - RNA, 21 nt, synthetic construct
  source 1..21: mol_type = other RNA
caacatcttggtcagatttga

SEQ ID NO: 1417 - RNA, 21 nt, synthetic construct
  source 1..21: mol_type = other RNA
caaccatgccttactttatca

SEQ ID NO: 1418 - RNA, 21 nt, synthetic construct
  source 1..21: mol_type = other RNA
caagagattgaagagttcaaa

SEQ ID NO: 1419 - RNA, 21 nt, synthetic construct
  source 1..21: mol_type = other RNA
caagatgttgatgttggataa

SEQ ID NO: 1420 - RNA, 21 nt, synthetic construct
  source 1..21: mol_type = other RNA
caagctttgagtgcaagagat

SEQ ID NO: 1421 - RNA, 21 nt, synthetic construct
  source 1..21: mol_type = other RNA
caatctcttgcactcaaagct

SEQ ID NO: 1422 - RNA, 21 nt, synthetic construct
  source 1..21: mol_type = other RNA
caatttacatactctgcttag

SEQ ID NO: 1423 - RNA, 21 nt, synthetic construct
  source 1..21: mol_type = other RNA
cacaaccatgccttactttat

SEQ ID NO: 1424 - RNA, 21 nt, synthetic construct
  source 1..21: mol_type = other RNA
cacgcttaactatcttaacaa

SEQ ID NO: 1425 - RNA, 21 nt, synthetic construct
  source 1..21: mol_type = other RNA
cactcaaagcttgttaagata

SEQ ID NO: 1426 - RNA, 21 nt, synthetic construct
  source 1..21: mol_type = other RNA
cagagaattctcttatccaac

SEQ ID NO: 1427 - RNA, 21 nt, synthetic construct
  source 1..21: mol_type = other RNA
cagagtatgtaaattggaagt

SEQ ID NO: 1428 - RNA, 21 nt, synthetic construct
  source 1..21: mol_type = other RNA
cagattaaccacaaccatgcc

SEQ ID NO: 1429 - RNA, 21 nt, synthetic construct
  source 1..21: mol_type = other RNA
cagatttgaactcttcaatct

SEQ ID NO: 1430 - RNA, 21 nt, synthetic construct
  source 1..21: mol_type = other RNA
caggattattggaaatttgtt

SEQ ID NO: 1431 - RNA, 21 nt, synthetic construct
  source 1..21: mol_type = other RNA
catactctgcttagaatttgg

SEQ ID NO: 1432 - RNA, 21 nt, synthetic construct
  source 1..21: mol_type = other RNA
catcaacatcttggtcagatt

SEQ ID NO: 1433 - RNA, 21 nt, synthetic construct
  source 1..21: mol_type = other RNA
catcttggtcagatttgaact

SEQ ID NO: 1434 - RNA, 21 nt, synthetic construct
  source 1..21: mol_type = other RNA
catgccttactttatcaaatg

SEQ ID NO: 1435 - RNA, 21 nt, synthetic construct
  source 1..21: mol_type = other RNA
catggttgtggttaatctggt

SEQ ID NO: 1436 - RNA, 21 nt, synthetic construct
  source 1..21: mol_type = other RNA
catttgataaagtaaggcatg

SEQ ID NO: 1437 - RNA, 21 nt, synthetic construct
  source 1..21: mol_type = other RNA
ccaaattctaagcagagtatg

SEQ ID NO: 1438 - RNA, 21 nt, synthetic construct
  source 1..21: mol_type = other RNA
ccaacatcaacatcttggtca

SEQ ID NO: 1439 - RNA, 21 nt, synthetic construct
  source 1..21: mol_type = other RNA
ccaagatgttgatgttggata

SEQ ID NO: 1440 - RNA, 21 nt, synthetic construct
  source 1..21: mol_type = other RNA
ccaataatcctgtcaattata

SEQ ID NO: 1441 - RNA, 21 nt, synthetic construct
  source 1..21: mol_type = other RNA
ccaatttacatactctgctta

SEQ ID NO: 1442 - RNA, 21 nt, synthetic construct
  source 1..21: mol_type = other RNA
ccacaaccatgccttacttta

SEQ ID NO: 1443 - RNA, 21 nt, synthetic construct
  source 1..21: mol_type = other RNA
ccagattaaccacaaccatgc

SEQ ID NO: 1444 - RNA, 21 nt, synthetic construct
  source 1..21: mol_type = other RNA
ccatgccttactttatcaaat

SEQ ID NO: 1445 - RNA, 21 nt, synthetic construct
  source 1..21: mol_type = other RNA
cccaaattctaagcagagtat

SEQ ID NO: 1446 - RNA, 21 nt, synthetic construct
  source 1..21: mol_type = other RNA
ccccaaattctaagcagagta

SEQ ID NO: 1447 - RNA, 21 nt, synthetic construct
  source 1..21: mol_type = other RNA
cccccaaattctaagcagagt

SEQ ID NO: 1448 - RNA, 21 nt, synthetic construct
  source 1..21: mol_type = other RNA
cgcttaactatcttaacaagc

SEQ ID NO: 1449 - RNA, 21 nt, synthetic construct
  source 1..21: mol_type = other RNA
cgtgcataagttaacttccaa

SEQ ID NO: 1450 - RNA, 21 nt, synthetic construct
  source 1..21: mol_type = other RNA
ctaaattttcccccaaattct

SEQ ID NO: 1451 - RNA, 21 nt, synthetic construct
  source 1..21: mol_type = other RNA
ctaagcagagtatgtaaattg

SEQ ID NO: 1452 - RNA, 21 nt, synthetic construct
  source 1..21: mol_type = other RNA
ctatcttaacaagctttgagt

SEQ ID NO: 1453 - RNA, 21 nt, synthetic construct
  source 1..21: mol_type = other RNA
ctcaaagcttgttaagatagt

SEQ ID NO: 1454 - RNA, 21 nt, synthetic construct
  source 1..21: mol_type = other RNA
ctctgcttagaatttggggga

SEQ ID NO: 1455 - RNA, 21 nt, synthetic construct
  source 1..21: mol_type = other RNA
ctcttatccaacatcaacatc

SEQ ID NO: 1456 - RNA, 21 nt, synthetic construct
  source 1..21: mol_type = other RNA
ctcttcaatctcttgcactca

SEQ ID NO: 1457 - RNA, 21 nt, synthetic construct
  source 1..21: mol_type = other RNA
ctcttgcactcaaagcttgtt

SEQ ID NO: 1458 - RNA, 21 nt, synthetic construct
  source 1..21: mol_type = other RNA
ctgaccaagatgttgatgttg

SEQ ID NO: 1459 - RNA, 21 nt, synthetic construct
  source 1..21: mol_type = other RNA
ctgcttagaatttgggggaaa

SEQ ID NO: 1460 - RNA, 21 nt, synthetic construct
  source 1..21: mol_type = other RNA
ctggtttatttttgttccaca

SEQ ID NO: 1461 - RNA, 21 nt, synthetic construct
  source 1..21: mol_type = other RNA
cttaacaagctttgagtgcaa

SEQ ID NO: 1462 - RNA, 21 nt, synthetic construct
  source 1..21: mol_type = other RNA
cttaactatcttaacaagctt

SEQ ID NO: 1463 - RNA, 21 nt, synthetic construct
  source 1..21: mol_type = other RNA
cttagaatttgggggaaaatt

SEQ ID NO: 1464 - RNA, 21 nt, synthetic construct
  source 1..21: mol_type = other RNA
cttagaggtggggagcagaga

SEQ ID NO: 1465 - RNA, 21 nt, synthetic construct
  source 1..21: mol_type = other RNA
cttatccaacatcaacatctt

SEQ ID NO: 1466 - RNA, 21 nt, synthetic construct
  source 1..21: mol_type = other RNA
cttatgcacgcttaactatct

SEQ ID NO: 1467 - RNA, 21 nt, synthetic construct
  source 1..21: mol_type = other RNA
cttcaatctcttgcactcaaa

SEQ ID NO: 1468 - RNA, 21 nt, synthetic construct
  source 1..21: mol_type = other RNA
cttccaatttacatactctgc

SEQ ID NO: 1469 - RNA, 21 nt, synthetic construct
  source 1..21: mol_type = other RNA
cttgcactcaaagcttgttaa

SEQ ID NO: 1470 - RNA, 21 nt, synthetic construct
  source 1..21: mol_type = other RNA
cttggtcagatttgaactctt

SEQ ID NO: 1471 - RNA, 21 nt, synthetic construct
  source 1..21: mol_type = other RNA
cttgtggaacaaaaataaacc

SEQ ID NO: 1472 - RNA, 21 nt, synthetic construct
  source 1..21: mol_type = other RNA
cttgttaagatagttaagcgt

SEQ ID NO: 1473 - RNA, 21 nt, synthetic construct
  source 1..21: mol_type = other RNA
ctttgagtgcaagagattgaa

SEQ ID NO: 1474 - RNA, 21 nt, synthetic construct
  source 1..21: mol_type = other RNA
gaactcttcaatctcttgcac

SEQ ID NO: 1475 - RNA, 21 nt, synthetic construct
  source 1..21: mol_type = other RNA
gaagagttcaaatctgaccaa

SEQ ID NO: 1476 - RNA, 21 nt, synthetic construct
  source 1..21: mol_type = other RNA
gaagttaacttatgcacgctt

SEQ ID NO: 1477 - RNA, 21 nt, synthetic construct
  source 1..21: mol_type = other RNA
gaattctcttatccaacatca

SEQ ID NO: 1478 - RNA, 21 nt, synthetic construct
  source 1..21: mol_type = other RNA
gaatttgggggaaaatttaga

SEQ ID NO: 1479 - RNA, 21 nt, synthetic construct
  source 1..21: mol_type = other RNA
gacaggattattggaaatttg

SEQ ID NO: 1480 - RNA, 21 nt, synthetic construct
  source 1..21: mol_type = other RNA
gaccaagatgttgatgttgga

SEQ ID NO: 1481 - RNA, 21 nt, synthetic construct
  source 1..21: mol_type = other RNA
gagaattctcttatccaacat

SEQ ID NO: 1482 - RNA, 21 nt, synthetic construct
  source 1..21: mol_type = other RNA
gagattgaagagttcaaatct

SEQ ID NO: 1483 - RNA, 21 nt, synthetic construct
  source 1..21: mol_type = other RNA
gagcagagaattctcttatcc

SEQ ID NO: 1484 - RNA, 21 nt, synthetic construct
  source 1..21: mol_type = other RNA
gaggtggggagcagagaattc

SEQ ID NO: 1485 - RNA, 21 nt, synthetic construct
  source 1..21: mol_type = other RNA
gagtatgtaaattggaagtta

SEQ ID NO: 1486 - RNA, 21 nt, synthetic construct
  source 1..21: mol_type = other RNA
gagtgcaagagattgaagagt

SEQ ID NO: 1487 - RNA, 21 nt, synthetic construct
  source 1..21: mol_type = other RNA
gagttcaaatctgaccaagat

SEQ ID NO: 1488 - RNA, 21 nt, synthetic construct
  source 1..21: mol_type = other RNA
gataaagtaaggcatggttgt

SEQ ID NO: 1489 - RNA, 21 nt, synthetic construct
  source 1..21: mol_type = other RNA
gataagagaattctctgctcc

SEQ ID NO: 1490 - RNA, 21 nt, synthetic construct
  source 1..21: mol_type = other RNA
gatagttaagcgtgcataagt

SEQ ID NO: 1491 - RNA, 21 nt, synthetic construct
  source 1..21: mol_type = other RNA
gatgttgatgttggataagag

SEQ ID NO: 1492 - RNA, 21 nt, synthetic construct
  source 1..21: mol_type = other RNA
gatgttggataagagaattct

SEQ ID NO: 1493 - RNA, 21 nt, synthetic construct
  source 1..21: mol_type = other RNA
gattaaccacaaccatgcctt

SEQ ID NO: 1494 - RNA, 21 nt, synthetic construct
  source 1..21: mol_type = other RNA
gattgaagagttcaaatctga

SEQ ID NO: 1495 - RNA, 21 nt, synthetic construct
  source 1..21: mol_type = other RNA
gatttatttaacttgtggaac

SEQ ID NO: 1496 - RNA, 21 nt, synthetic construct
  source 1..21: mol_type = other RNA
gatttgaactcttcaatctct

SEQ ID NO: 1497 - RNA, 21 nt, synthetic construct
  source 1..21: mol_type = other RNA
gcaagagattgaagagttcaa

SEQ ID NO: 1498 - RNA, 21 nt, synthetic construct
  source 1..21: mol_type = other RNA
gcacgcttaactatcttaaca

SEQ ID NO: 1499 - RNA, 21 nt, synthetic construct
  source 1..21: mol_type = other RNA
gcactcaaagcttgttaagat

SEQ ID NO: 1500 - RNA, 21 nt, synthetic construct
  source 1..21: mol_type = other RNA
gcagagaattctcttatccaa

SEQ ID NO: 1501 - RNA, 21 nt, synthetic construct
  source 1..21: mol_type = other RNA
gcagagtatgtaaattggaag

SEQ ID NO: 1502 - RNA, 21 nt, synthetic construct
  source 1..21: mol_type = other RNA
gcataagttaacttccaattt

SEQ ID NO: 1503 - RNA, 21 nt, synthetic construct
  source 1..21: mol_type = other RNA
gcatggttgtggttaatctgg

SEQ ID NO: 1504 - RNA, 21 nt, synthetic construct
  source 1..21: mol_type = other RNA
gccttactttatcaaatgtat

SEQ ID NO: 1505 - RNA, 21 nt, synthetic construct
  source 1..21: mol_type = other RNA
gcgtgcataagttaacttcca

SEQ ID NO: 1506 - RNA, 21 nt, synthetic construct
  source 1..21: mol_type = other RNA
gcttaactatcttaacaagct

SEQ ID NO: 1507 - RNA, 21 nt, synthetic construct
  source 1..21: mol_type = other RNA
gcttagaatttgggggaaaat

SEQ ID NO: 1508 - RNA, 21 nt, synthetic construct
  source 1..21: mol_type = other RNA
gcttgttaagatagttaagcg

SEQ ID NO: 1509 - RNA, 21 nt, synthetic construct
  source 1..21: mol_type = other RNA
gctttgagtgcaagagattga

SEQ ID NO: 1510 - RNA, 21 nt, synthetic construct
  source 1..21: mol_type = other RNA
ggaacaaaaataaaccagatt

SEQ ID NO: 1511 - RNA, 21 nt, synthetic construct
  source 1..21: mol_type = other RNA
ggaagttaacttatgcacgct

SEQ ID NO: 1512 - RNA, 21 nt, synthetic construct
  source 1..21: mol_type = other RNA
ggagcagagaattctcttatc

SEQ ID NO: 1513 - RNA, 21 nt, synthetic construct
  source 1..21: mol_type = other RNA
ggataagagaattctctgctc

SEQ ID NO: 1514 - RNA, 21 nt, synthetic construct
  source 1..21: mol_type = other RNA
ggcatggttgtggttaatctg

SEQ ID NO: 1515 - RNA, 21 nt, synthetic construct
  source 1..21: mol_type = other RNA
gggagcagagaattctcttat

SEQ ID NO: 1516 - RNA, 21 nt, synthetic construct
  source 1..21: mol_type = other RNA
ggggagcagagaattctctta

SEQ ID NO: 1517 - RNA, 21 nt, synthetic construct
  source 1..21: mol_type = other RNA
gggggaaaatttagaaatata

SEQ ID NO: 1518 - RNA, 21 nt, synthetic construct
  source 1..21: mol_type = other RNA
ggtcagatttgaactcttcaa

SEQ ID NO: 1519 - RNA, 21 nt, synthetic construct
  source 1..21: mol_type = other RNA
ggtggggagcagagaattctc

SEQ ID NO: 1520 - RNA, 21 nt, synthetic construct
  source 1..21: mol_type = other RNA
ggttaatctggtttatttttg

SEQ ID NO: 1521 - RNA, 21 nt, synthetic construct
  source 1..21: mol_type = other RNA
ggttgtggttaatctggttta

SEQ ID NO: 1522 - RNA, 21 nt, synthetic construct
  source 1..21: mol_type = other RNA
ggtttatttttgttccacaag

SEQ ID NO: 1523 - RNA, 21 nt, synthetic construct
  source 1..21: mol_type = other RNA
gtaaggcatggttgtggttaa

SEQ ID NO: 1524 - RNA, 21 nt, synthetic construct
  source 1..21: mol_type = other RNA
gtatgtaaattggaagttaac

SEQ ID NO: 1525 - RNA, 21 nt, synthetic construct
  source 1..21: mol_type = other RNA
gtcagatttgaactcttcaat

SEQ ID NO: 1526 - RNA, 21 nt, synthetic construct
  source 1..21: mol_type = other RNA
gtgcaagagattgaagagttc

SEQ ID NO: 1527 - RNA, 21 nt, synthetic construct
  source 1..21: mol_type = other RNA
gtgcataagttaacttccaat

SEQ ID NO: 1528 - RNA, 21 nt, synthetic construct
  source 1..21: mol_type = other RNA
gtggaacaaaaataaaccaga

SEQ ID NO: 1529 - RNA, 21 nt, synthetic construct
  source 1..21: mol_type = other RNA
gtggggagcagagaattctct

SEQ ID NO: 1530 - RNA, 21 nt, synthetic construct
  source 1..21: mol_type = other RNA
gtggttaatctggtttatttt

SEQ ID NO: 1531 - RNA, 21 nt, synthetic construct
  source 1..21: mol_type = other RNA
gttaacttatgcacgcttaac

SEQ ID NO: 1532 - RNA, 21 nt, synthetic construct
  source 1..21: mol_type = other RNA
gttaacttccaatttacatac

SEQ ID NO: 1533 - RNA, 21 nt, synthetic construct
  source 1..21: mol_type = other RNA
gttaagatagttaagcgtgca

SEQ ID NO: 1534 - RNA, 21 nt, synthetic construct
  source 1..21: mol_type = other RNA
gttaagcgtgcataagttaac

SEQ ID NO: 1535 - RNA, 21 nt, synthetic construct
  source 1..21: mol_type = other RNA
gttcaaatctgaccaagatgt

SEQ ID NO: 1536 - RNA, 21 nt, synthetic construct
  source 1..21: mol_type = other RNA
gttccacaagttaaataaatc

SEQ ID NO: 1537 - RNA, 21 nt, synthetic construct
  source 1..21: mol_type = other RNA
gttgatgttggataagagaat

SEQ ID NO: 1538 - RNA, 21 nt, synthetic construct
  source 1..21: mol_type = other RNA
gttggataagagaattctctg

SEQ ID NO: 1539 - RNA, 21 nt, synthetic construct
  source 1..21: mol_type = other RNA
gttgtggttaatctggtttat

SEQ ID NO: 1540 - RNA, 21 nt, synthetic construct
  source 1..21: mol_type = other RNA
gtttatttttgttccacaagt

SEQ ID NO: 1541 - RNA, 21 nt, synthetic construct
  source 1..21: mol_type = other RNA
taaaccagattaaccacaacc

SEQ ID NO: 1542 - RNA, 21 nt, synthetic construct
  source 1..21: mol_type = other RNA
taaagtaaggcatggttgtgg

SEQ ID NO: 1543 - RNA, 21 nt, synthetic construct
  source 1..21: mol_type = other RNA
taaattttcccccaaattcta

SEQ ID NO: 1544 - RNA, 21 nt, synthetic construct
  source 1..21: mol_type = other RNA
taacaagctttgagtgcaaga

SEQ ID NO: 1545 - RNA, 21 nt, synthetic construct
  source 1..21: mol_type = other RNA
taaccacaaccatgccttact

SEQ ID NO: 1546 - RNA, 21 nt, synthetic construct
  source 1..21: mol_type = other RNA
taactatcttaacaagctttg

SEQ ID NO: 1547 - RNA, 21 nt, synthetic construct
  source 1..21: mol_type = other RNA
taacttatgcacgcttaacta

SEQ ID NO: 1548 - RNA, 21 nt, synthetic construct
  source 1..21: mol_type = other RNA
taacttccaatttacatactc

SEQ ID NO: 1549 - RNA, 21 nt, synthetic construct
  source 1..21: mol_type = other RNA
taagagaattctctgctcccc

SEQ ID NO: 1550 - RNA, 21 nt, synthetic construct
  source 1..21: mol_type = other RNA
taagatagttaagcgtgcata

SEQ ID NO: 1551 - RNA, 21 nt, synthetic construct
  source 1..21: mol_type = other RNA
taagcagagtatgtaaattgg

SEQ ID NO: 1552 - RNA, 21 nt, synthetic construct
  source 1..21: mol_type = other RNA
taagcgtgcataagttaactt

SEQ ID NO: 1553 - RNA, 21 nt, synthetic construct
  source 1..21: mol_type = other RNA
taaggcatggttgtggttaat

SEQ ID NO: 1554 - RNA, 21 nt, synthetic construct
  source 1..21: mol_type = other RNA
taattgacaggattattggaa

SEQ ID NO: 1555 - RNA, 21 nt, synthetic construct
  source 1..21: mol_type = other RNA
tacatactctgcttagaattt

SEQ ID NO: 1556 - RNA, 21 nt, synthetic construct
  source 1..21: mol_type = other RNA
tacatttgataaagtaaggca

SEQ ID NO: 1557 - RNA, 21 nt, synthetic construct
  source 1..21: mol_type = other RNA
tactctgcttagaatttgggg

SEQ ID NO: 1558 - RNA, 21 nt, synthetic construct
  source 1..21: mol_type = other RNA
tagaatttgggggaaaattta

SEQ ID NO: 1559 - RNA, 21 nt, synthetic construct
  source 1..21: mol_type = other RNA
tagaggtggggagcagagaat

SEQ ID NO: 1560 - RNA, 21 nt, synthetic construct
  source 1..21: mol_type = other RNA
tagttaagcgtgcataagtta

SEQ ID NO: 1561 - RNA, 21 nt, synthetic construct
  source 1..21: mol_type = other RNA
tataattgacaggattattgg

SEQ ID NO: 1562 - RNA, 21 nt, synthetic construct
  source 1..21: mol_type = other RNA
tatatttctaaattttccccc

SEQ ID NO: 1563 - RNA, 21 nt, synthetic construct
  source 1..21: mol_type = other RNA
tatccaacatcaacatcttgg

SEQ ID NO: 1564 - RNA, 21 nt, synthetic construct
  source 1..21: mol_type = other RNA
tatcttaacaagctttgagtg

SEQ ID NO: 1565 - RNA, 21 nt, synthetic construct
  source 1..21: mol_type = other RNA
tatgcacgcttaactatctta

SEQ ID NO: 1566 - RNA, 21 nt, synthetic construct
  source 1..21: mol_type = other RNA
tatttctaaattttcccccaa

SEQ ID NO: 1567 - RNA, 21 nt, synthetic construct
  source 1..21: mol_type = other RNA
tcaaagcttgttaagatagtt

SEQ ID NO: 1568 - RNA, 21 nt, synthetic construct
  source 1..21: mol_type = other RNA
tcaaatctgaccaagatgttg

SEQ ID NO: 1569 - RNA, 21 nt, synthetic construct
  source 1..21: mol_type = other RNA
tcaacatcttggtcagatttg

SEQ ID NO: 1570 - RNA, 21 nt, synthetic construct
  source 1..21: mol_type = other RNA
tcaatctcttgcactcaaagc

SEQ ID NO: 1571 - RNA, 21 nt, synthetic construct
  source 1..21: mol_type = other RNA
tcagatttgaactcttcaatc

SEQ ID NO: 1572 - RNA, 21 nt, synthetic construct
  source 1..21: mol_type = other RNA
tccaacatcaacatcttggtc

SEQ ID NO: 1573 - RNA, 21 nt, synthetic construct
  source 1..21: mol_type = other RNA
tccaataatcctgtcaattat

SEQ ID NO: 1574 - RNA, 21 nt, synthetic construct
  source 1..21: mol_type = other RNA
tccaatttacatactctgctt

SEQ ID NO: 1575 - RNA, 21 nt, synthetic construct
  source 1..21: mol_type = other RNA
tcccccaaattctaagcagag

SEQ ID NO: 1576 - RNA, 21 nt, synthetic construct
  source 1..21: mol_type = other RNA
tctaaattttcccccaaattc

SEQ ID NO: 1577 - RNA, 21 nt, synthetic construct
  source 1..21: mol_type = other RNA
tctaagcagagtatgtaaatt

SEQ ID NO: 1578 - RNA, 21 nt, synthetic construct
  source 1..21: mol_type = other RNA
tctcttatccaacatcaacat

SEQ ID NO: 1579 - RNA, 21 nt, synthetic construct
  source 1..21: mol_type = other RNA
tctcttgcactcaaagcttgt

SEQ ID NO: 1580 - RNA, 21 nt, synthetic construct
  source 1..21: mol_type = other RNA
tctgaccaagatgttgatgtt

SEQ ID NO: 1581 - RNA, 21 nt, synthetic construct
  source 1..21: mol_type = other RNA
tctgcttagaatttgggggaa

SEQ ID NO: 1582 - RNA, 21 nt, synthetic construct
  source 1..21: mol_type = other RNA
tctggtttatttttgttccac

SEQ ID NO: 1583 - RNA, 21 nt, synthetic construct
  source 1..21: mol_type = other RNA
tcttaacaagctttgagtgca

SEQ ID NO: 1584 - RNA, 21 nt, synthetic construct
  source 1..21: mol_type = other RNA
tcttatccaacatcaacatct

SEQ ID NO: 1585 - RNA, 21 nt, synthetic construct
  source 1..21: mol_type = other RNA
tcttcaatctcttgcactcaa

SEQ ID NO: 1586 - RNA, 21 nt, synthetic construct
  source 1..21: mol_type = other RNA
tcttgcactcaaagcttgtta

SEQ ID NO: 1587 - RNA, 21 nt, synthetic construct
  source 1..21: mol_type = other RNA
tcttggtcagatttgaactct

SEQ ID NO: 1588 - RNA, 21 nt, synthetic construct
  source 1..21: mol_type = other RNA
tgaactcttcaatctcttgca

SEQ ID NO: 1589 - RNA, 21 nt, synthetic construct
  source 1..21: mol_type = other RNA
tgaagagttcaaatctgacca

SEQ ID NO: 1590 - RNA, 21 nt, synthetic construct
  source 1..21: mol_type = other RNA
tgacaggattattggaaattt

SEQ ID NO: 1591 - RNA, 21 nt, synthetic construct
  source 1..21: mol_type = other RNA
tgaccaagatgttgatgttgg

SEQ ID NO: 1592 - RNA, 21 nt, synthetic construct
  source 1..21: mol_type = other RNA
tgagtgcaagagattgaagag

SEQ ID NO: 1593 - RNA, 21 nt, synthetic construct
  source 1..21: mol_type = other RNA
tgataaagtaaggcatggttg

SEQ ID NO: 1594 - RNA, 21 nt, synthetic construct
  source 1..21: mol_type = other RNA
tgatgttggataagagaattc

SEQ ID NO: 1595 - RNA, 21 nt, synthetic construct
  source 1..21: mol_type = other RNA
tgcaagagattgaagagttca

SEQ ID NO: 1596 - RNA, 21 nt, synthetic construct
  source 1..21: mol_type = other RNA
tgcacgcttaactatcttaac

SEQ ID NO: 1597 - RNA, 21 nt, synthetic construct
  source 1..21: mol_type = other RNA
tgcactcaaagcttgttaaga

SEQ ID NO: 1598 - RNA, 21 nt, synthetic construct
  source 1..21: mol_type = other RNA
tgcataagttaacttccaatt

SEQ ID NO: 1599 - RNA, 21 nt, synthetic construct
  source 1..21: mol_type = other RNA
tgccttactttatcaaatgta

SEQ ID NO: 1600 - RNA, 21 nt, synthetic construct
  source 1..21: mol_type = other RNA
tgcttagaatttgggggaaaa

SEQ ID NO: 1601 - RNA, 21 nt, synthetic construct
  source 1..21: mol_type = other RNA
tggaacaaaaataaaccagat

SEQ ID NO: 1602 - RNA, 21 nt, synthetic construct
  source 1..21: mol_type = other RNA
tggaagttaacttatgcacgc

SEQ ID NO: 1603 - RNA, 21 nt, synthetic construct
  source 1..21: mol_type = other RNA
tggataagagaattctctgct

SEQ ID NO: 1604 - RNA, 21 nt, synthetic construct
  source 1..21: mol_type = other RNA
tggggagcagagaattctctt

SEQ ID NO: 1605 - RNA, 21 nt, synthetic construct
  source 1..21: mol_type = other RNA
tgggggaaaatttagaaatat

SEQ ID NO: 1606 - RNA, 21 nt, synthetic construct
  source 1..21: mol_type = other RNA
tggtcagatttgaactcttca

SEQ ID NO: 1607 - RNA, 21 nt, synthetic construct
  source 1..21: mol_type = other RNA
tggttgtggttaatctggttt

SEQ ID NO: 1608 - RNA, 21 nt, synthetic construct
  source 1..21: mol_type = other RNA
tggtttatttttgttccacaa

SEQ ID NO: 1609 - RNA, 21 nt, synthetic construct
  source 1..21: mol_type = other RNA
tgtggaacaaaaataaaccag

SEQ ID NO: 1610 - RNA, 21 nt, synthetic construct
  source 1..21: mol_type = other RNA
tgtggttaatctggtttattt

SEQ ID NO: 1611 - RNA, 21 nt, synthetic construct
  source 1..21: mol_type = other RNA
tgttaagatagttaagcgtgc

SEQ ID NO: 1612 - RNA, 21 nt, synthetic construct
  source 1..21: mol_type = other RNA
tgttgatgttggataagagaa

SEQ ID NO: 1613 - RNA, 21 nt, synthetic construct
  source 1..21: mol_type = other RNA
tgttggataagagaattctct

SEQ ID NO: 1614 - RNA, 21 nt, synthetic construct
  source 1..21: mol_type = other RNA
ttaacaagctttgagtgcaag

SEQ ID NO: 1615 - RNA, 21 nt, synthetic construct
  source 1..21: mol_type = other RNA
ttaaccacaaccatgccttac

SEQ ID NO: 1616 - RNA, 21 nt, synthetic construct
  source 1..21: mol_type = other RNA
ttaacttatgcacgcttaact

SEQ ID NO: 1617 - RNA, 21 nt, synthetic construct
  source 1..21: mol_type = other RNA
ttaagatagttaagcgtgcat

SEQ ID NO: 1618 - RNA, 21 nt, synthetic construct
  source 1..21: mol_type = other RNA
ttaagcgtgcataagttaact

SEQ ID NO: 1619 - RNA, 21 nt, synthetic construct
  source 1..21: mol_type = other RNA
ttacatactctgcttagaatt

SEQ ID NO: 1620 - RNA, 21 nt, synthetic construct
  source 1..21: mol_type = other RNA
ttagaatttgggggaaaattt

SEQ ID NO: 1621 - RNA, 21 nt, synthetic construct
  source 1..21: mol_type = other RNA
ttagaggtggggagcagagaa

SEQ ID NO: 1622 - RNA, 21 nt, synthetic construct
  source 1..21: mol_type = other RNA
ttatccaacatcaacatcttg

SEQ ID NO: 1623 - RNA, 21 nt, synthetic construct
  source 1..21: mol_type = other RNA
ttatgcacgcttaactatctt

SEQ ID NO: 1624 - RNA, 21 nt, synthetic construct
  source 1..21: mol_type = other RNA
ttcaaatctgaccaagatgtt

SEQ ID NO: 1625 - RNA, 21 nt, synthetic construct
  source 1..21: mol_type = other RNA
ttcaatctcttgcactcaaag

SEQ ID NO: 1626 - RNA, 21 nt, synthetic construct
  source 1..21: mol_type = other RNA
ttccaataatcctgtcaatta

SEQ ID NO: 1627 - RNA, 21 nt, synthetic construct
  source 1..21: mol_type = other RNA
ttccaatttacatactctgct

SEQ ID NO: 1628 - RNA, 21 nt, synthetic construct
  source 1..21: mol_type = other RNA
ttcccccaaattctaagcaga

SEQ ID NO: 1629 - RNA, 21 nt, synthetic construct
  source 1..21: mol_type = other RNA
ttctaaattttcccccaaatt

SEQ ID NO: 1630 - RNA, 21 nt, synthetic construct
  source 1..21: mol_type = other RNA
ttctaagcagagtatgtaaat

SEQ ID NO: 1631 - RNA, 21 nt, synthetic construct
  source 1..21: mol_type = other RNA
ttctcttatccaacatcaaca

SEQ ID NO: 1632 - RNA, 21 nt, synthetic construct
  source 1..21: mol_type = other RNA
ttgaactcttcaatctcttgc

SEQ ID NO: 1633 - RNA, 21 nt, synthetic construct
  source 1..21: mol_type = other RNA
ttgaagagttcaaatctgacc

SEQ ID NO: 1634 - RNA, 21 nt, synthetic construct
  source 1..21: mol_type = other RNA
ttgacaggattattggaaatt

SEQ ID NO: 1635 - RNA, 21 nt, synthetic construct
  source 1..21: mol_type = other RNA
ttgagtgcaagagattgaaga

SEQ ID NO: 1636 - RNA, 21 nt, synthetic construct
  source 1..21: mol_type = other RNA
ttgataaagtaaggcatggtt

SEQ ID NO: 1637 - RNA, 21 nt, synthetic construct
  source 1..21: mol_type = other RNA
ttgatgttggataagagaatt

SEQ ID NO: 1638 - RNA, 21 nt, synthetic construct
  source 1..21: mol_type = other RNA
ttgcactcaaagcttgttaag

SEQ ID NO: 1639 - RNA, 21 nt, synthetic construct
  source 1..21: mol_type = other RNA
ttggaagttaacttatgcacg

SEQ ID NO: 1640 - RNA, 21 nt, synthetic construct
  source 1..21: mol_type = other RNA
ttggataagagaattctctgc

SEQ ID NO: 1641 - RNA, 21 nt, synthetic construct
  source 1..21: mol_type = other RNA
ttgggggaaaatttagaaata

SEQ ID NO: 1642 - RNA, 21 nt, synthetic construct
  source 1..21: mol_type = other RNA
ttggtcagatttgaactcttc

SEQ ID NO: 1643 - RNA, 21 nt, synthetic construct
  source 1..21: mol_type = other RNA
ttgtggaacaaaaataaacca

SEQ ID NO: 1644 - RNA, 21 nt, synthetic construct
  source 1..21: mol_type = other RNA
ttgtggttaatctggtttatt

SEQ ID NO: 1645 - RNA, 21 nt, synthetic construct
  source 1..21: mol_type = other RNA
ttgttaagatagttaagcgtg

SEQ ID NO: 1646 - RNA, 21 nt, synthetic construct
  source 1..21: mol_type = other RNA
tttacatactctgcttagaat

SEQ ID NO: 1647 - RNA, 21 nt, synthetic construct
  source 1..21: mol_type = other RNA
tttccaataatcctgtcaatt

SEQ ID NO: 1648 - RNA, 21 nt, synthetic construct
  source 1..21: mol_type = other RNA
tttcccccaaattctaagcag

SEQ ID NO: 1649 - RNA, 21 nt, synthetic construct
  source 1..21: mol_type = other RNA
tttctaaattttcccccaaat

SEQ ID NO: 1650 - RNA, 21 nt, synthetic construct
  source 1..21: mol_type = other RNA
tttgaactcttcaatctcttg

SEQ ID NO: 1651 - RNA, 21 nt, synthetic construct
  source 1..21: mol_type = other RNA
tttgagtgcaagagattgaag

SEQ ID NO: 1652 - RNA, 21 nt, synthetic construct
  source 1..21: mol_type = other RNA
tttgataaagtaaggcatggt

SEQ ID NO: 1653 - RNA, 21 nt, synthetic construct
  source 1..21: mol_type = other RNA
tttgggggaaaatttagaaat

SEQ ID NO: 1654 - RNA, 21 nt, synthetic construct
  source 1..21: mol_type = other RNA
ttttcccccaaattctaagca

SEQ ID NO: 1655 - RNA, 22 nt, synthetic construct
  source 1..22: mol_type = other RNA
aaaaataaaccagattaaccac

SEQ ID NO: 1656 - RNA, 22 nt, synthetic construct
  source 1..22: mol_type = other RNA
aaaataaaccagattaaccaca

SEQ ID NO: 1657 - RNA, 22 nt, synthetic construct
  source 1..22: mol_type = other RNA
aaaccagattaaccacaaccat

SEQ ID NO: 1658 - RNA, 22 nt, synthetic construct
  source 1..22: mol_type = other RNA
aaagcttgttaagatagttaag

SEQ ID NO: 1659 - RNA, 22 nt, synthetic construct
  source 1..22: mol_type = other RNA
aaagtaaggcatggttgtggtt

SEQ ID NO: 1660 - RNA, 22 nt, synthetic construct
  source 1..22: mol_type = other RNA
aaataaaccagattaaccacaa

SEQ ID NO: 1661 - RNA, 22 nt, synthetic construct
  source 1..22: mol_type = other RNA
aaatctgaccaagatgttgatg

SEQ ID NO: 1662 - RNA, 22 nt, synthetic construct
  source 1..22: mol_type = other RNA
aaattctaagcagagtatgtaa

SEQ ID NO: 1663 - RNA, 22 nt, synthetic construct
  source 1..22: mol_type = other RNA
aaattggaagttaacttatgca

SEQ ID NO: 1664 - RNA, 22 nt, synthetic construct
  source 1..22: mol_type = other RNA
aaatttccaataatcctgtcaa

SEQ ID NO: 1665 - RNA, 22 nt, synthetic construct
  source 1..22: mol_type = other RNA
aaattttcccccaaattctaag

SEQ ID NO: 1666 - RNA, 22 nt, synthetic construct
  source 1..22: mol_type = other RNA
aacaaatttccaataatcctgt

SEQ ID NO: 1667 - RNA, 22 nt, synthetic construct
  source 1..22: mol_type = other RNA
aacaagctttgagtgcaagaga

SEQ ID NO: 1668 - RNA, 22 nt, synthetic construct
  source 1..22: mol_type = other RNA
aacatcaacatcttggtcagat

SEQ ID NO: 1669 - RNA, 22 nt, synthetic construct
  source 1..22: mol_type = other RNA
aacatcttggtcagatttgaac

SEQ ID NO: 1670 - RNA, 22 nt, synthetic construct
  source 1..22: mol_type = other RNA
aaccacaaccatgccttacttt

SEQ ID NO: 1671 - RNA, 22 nt, synthetic construct
  source 1..22: mol_type = other RNA
aaccagattaaccacaaccatg

SEQ ID NO: 1672 - RNA, 22 nt, synthetic construct
  source 1..22: mol_type = other RNA
aaccatgccttactttatcaaa

SEQ ID NO: 1673 - RNA, 22 nt, synthetic construct
  source 1..22: mol_type = other RNA
aactatcttaacaagctttgag

SEQ ID NO: 1674 - RNA, 22 nt, synthetic construct
  source 1..22: mol_type = other RNA
aactcttcaatctcttgcactc

SEQ ID NO: 1675 - RNA, 22 nt, synthetic construct
  source 1..22: mol_type = other RNA
aacttatgcacgcttaactatc

SEQ ID NO: 1676 - RNA, 22 nt, synthetic construct
  source 1..22: mol_type = other RNA
aacttccaatttacatactctg

SEQ ID NO: 1677 - RNA, 22 nt, synthetic construct
  source 1..22: mol_type = other RNA
aacttgtggaacaaaaataaac

SEQ ID NO: 1678 - RNA, 22 nt, synthetic construct
  source 1..22: mol_type = other RNA
aagagaattctctgctccccac

SEQ ID NO: 1679 - RNA, 22 nt, synthetic construct
  source 1..22: mol_type = other RNA
aagagattgaagagttcaaatc

SEQ ID NO: 1680 - RNA, 22 nt, synthetic construct
  source 1..22: mol_type = other RNA
aagagttcaaatctgaccaaga

SEQ ID NO: 1681 - RNA, 22 nt, synthetic construct
  source 1..22: mol_type = other RNA
aagatagttaagcgtgcataag

SEQ ID NO: 1682 - RNA, 22 nt, synthetic construct
  source 1..22: mol_type = other RNA
aagatgttgatgttggataaga

SEQ ID NO: 1683 - RNA, 22 nt, synthetic construct
  source 1..22: mol_type = other RNA
aagcagagtatgtaaattggaa

SEQ ID NO: 1684 - RNA, 22 nt, synthetic construct
  source 1..22: mol_type = other RNA
aagcgtgcataagttaacttcc

SEQ ID NO: 1685 - RNA, 22 nt, synthetic construct
  source 1..22: mol_type = other RNA
aagcttgttaagatagttaagc

SEQ ID NO: 1686 - RNA, 22 nt, synthetic construct
  source 1..22: mol_type = other RNA
aagctttgagtgcaagagattg

SEQ ID NO: 1687 - RNA, 22 nt, synthetic construct
  source 1..22: mol_type = other RNA
aaggcatggttgtggttaatct

SEQ ID NO: 1688 - RNA, 22 nt, synthetic construct
  source 1..22: mol_type = other RNA
aagtaaggcatggttgtggtta

SEQ ID NO: 1689 - RNA, 22 nt, synthetic construct
  source 1..22: mol_type = other RNA
aagttaacttatgcacgcttaa

SEQ ID NO: 1690 - RNA, 22 nt, synthetic construct
  source 1..22: mol_type = other RNA
aataaaccagattaaccacaac

SEQ ID NO: 1691 - RNA, 22 nt, synthetic construct
  source 1..22: mol_type = other RNA
aatctcttgcactcaaagcttg

SEQ ID NO: 1692 - RNA, 22 nt, synthetic construct
  source 1..22: mol_type = other RNA
aatctgaccaagatgttgatgt

SEQ ID NO: 1693 - RNA, 22 nt, synthetic construct
  source 1..22: mol_type = other RNA
aatctggtttatttttgttcca

SEQ ID NO: 1694 - RNA, 22 nt, synthetic construct
  source 1..22: mol_type = other RNA
aattctaagcagagtatgtaaa

SEQ ID NO: 1695 - RNA, 22 nt, synthetic construct
  source 1..22: mol_type = other RNA
aattctcttatccaacatcaac

SEQ ID NO: 1696 - RNA, 22 nt, synthetic construct
  source 1..22: mol_type = other RNA
aattgacaggattattggaaat

SEQ ID NO: 1697 - RNA, 22 nt, synthetic construct
  source 1..22: mol_type = other RNA
aattggaagttaacttatgcac

SEQ ID NO: 1698 - RNA, 22 nt, synthetic construct
  source 1..22: mol_type = other RNA
aatttacatactctgcttagaa

SEQ ID NO: 1699 - RNA, 22 nt, synthetic construct
  source 1..22: mol_type = other RNA
aatttccaataatcctgtcaat

SEQ ID NO: 1700 - RNA, 22 nt, synthetic construct
  source 1..22: mol_type = other RNA
aatttgggggaaaatttagaaa

SEQ ID NO: 1701 - RNA, 22 nt, synthetic construct
  source 1..22: mol_type = other RNA
aattttcccccaaattctaagc

SEQ ID NO: 1702 - RNA, 22 nt, synthetic construct
  source 1..22: mol_type = other RNA
acaaaaataaaccagattaacc

SEQ ID NO: 1703 - RNA, 22 nt, synthetic construct
  source 1..22: mol_type = other RNA
acaaatttccaataatcctgtc

SEQ ID NO: 1704 - RNA, 22 nt, synthetic construct
  source 1..22: mol_type = other RNA
acaaccatgccttactttatca

SEQ ID NO: 1705 - RNA, 22 nt, synthetic construct
  source 1..22: mol_type = other RNA
acaagctttgagtgcaagagat

SEQ ID NO: 1706 - RNA, 22 nt, synthetic construct
  source 1..22: mol_type = other RNA
acaggattattggaaatttgtt

SEQ ID NO: 1707 - RNA, 22 nt, synthetic construct
  source 1..22: mol_type = other RNA
acatactctgcttagaatttgg

SEQ ID NO: 1708 - RNA, 22 nt, synthetic construct
  source 1..22: mol_type = other RNA
acatcaacatcttggtcagatt

SEQ ID NO: 1709 - RNA, 22 nt, synthetic construct
  source 1..22: mol_type = other RNA
acatcttggtcagatttgaact

SEQ ID NO: 1710 - RNA, 22 nt, synthetic construct
  source 1..22: mol_type = other RNA
acatttgataaagtaaggcatg

SEQ ID NO: 1711 - RNA, 22 nt, synthetic construct
  source 1..22: mol_type = other RNA
accaagatgttgatgttggata

SEQ ID NO: 1712 - RNA, 22 nt, synthetic construct
  source 1..22: mol_type = other RNA
accacaaccatgccttacttta

SEQ ID NO: 1713 - RNA, 22 nt, synthetic construct
  source 1..22: mol_type = other RNA
accagattaaccacaaccatgc

SEQ ID NO: 1714 - RNA, 22 nt, synthetic construct
  source 1..22: mol_type = other RNA
accatgccttactttatcaaat

SEQ ID NO: 1715 - RNA, 22 nt, synthetic construct
  source 1..22: mol_type = other RNA
acgcttaactatcttaacaagc

SEQ ID NO: 1716 - RNA, 22 nt, synthetic construct
  source 1..22: mol_type = other RNA
actatcttaacaagctttgagt

SEQ ID NO: 1717 - RNA, 22 nt, synthetic construct
  source 1..22: mol_type = other RNA
actcaaagcttgttaagatagt

SEQ ID NO: 1718 - RNA, 22 nt, synthetic construct
  source 1..22: mol_type = other RNA
actctgcttagaatttggggga

SEQ ID NO: 1719 - RNA, 22 nt, synthetic construct
  source 1..22: mol_type = other RNA
actcttcaatctcttgcactca

SEQ ID NO: 1720 - RNA, 22 nt, synthetic construct
  source 1..22: mol_type = other RNA
acttagaggtggggagcagaga

SEQ ID NO: 1721 - RNA, 22 nt, synthetic construct
  source 1..22: mol_type = other RNA
acttatgcacgcttaactatct

SEQ ID NO: 1722 - RNA, 22 nt, synthetic construct
  source 1..22: mol_type = other RNA
acttccaatttacatactctgc

SEQ ID NO: 1723 - RNA, 22 nt, synthetic construct
  source 1..22: mol_type = other RNA
acttgtggaacaaaaataaacc

SEQ ID NO: 1724 - RNA, 22 nt, synthetic construct
  source 1..22: mol_type = other RNA
agaattctcttatccaacatca

SEQ ID NO: 1725 - RNA, 22 nt, synthetic construct
  source 1..22: mol_type = other RNA
agaatttgggggaaaatttaga

SEQ ID NO: 1726 - RNA, 22 nt, synthetic construct
  source 1..22: mol_type = other RNA
agagaattctcttatccaacat

SEQ ID NO: 1727 - RNA, 22 nt, synthetic construct
  source 1..22: mol_type = other RNA
agagattgaagagttcaaatct

SEQ ID NO: 1728 - RNA, 22 nt, synthetic construct
  source 1..22: mol_type = other RNA
agaggtggggagcagagaattc

SEQ ID NO: 1729 - RNA, 22 nt, synthetic construct
  source 1..22: mol_type = other RNA
agagtatgtaaattggaagtta

SEQ ID NO: 1730 - RNA, 22 nt, synthetic construct
  source 1..22: mol_type = other RNA
agagttcaaatctgaccaagat

SEQ ID NO: 1731 - RNA, 22 nt, synthetic construct
  source 1..22: mol_type = other RNA
agatagttaagcgtgcataagt

SEQ ID NO: 1732 - RNA, 22 nt, synthetic construct
  source 1..22: mol_type = other RNA
agatgttgatgttggataagag

SEQ ID NO: 1733 - RNA, 22 nt, synthetic construct
  source 1..22: mol_type = other RNA
agattaaccacaaccatgcctt

SEQ ID NO: 1734 - RNA, 22 nt, synthetic construct
  source 1..22: mol_type = other RNA
agattgaagagttcaaatctga

SEQ ID NO: 1735 - RNA, 22 nt, synthetic construct
  source 1..22: mol_type = other RNA
agatttgaactcttcaatctct

SEQ ID NO: 1736 - RNA, 22 nt, synthetic construct
  source 1..22: mol_type = other RNA
agcagagaattctcttatccaa

SEQ ID NO: 1737 - RNA, 22 nt, synthetic construct
  source 1..22: mol_type = other RNA
agcagagtatgtaaattggaag

SEQ ID NO: 1738 - RNA, 22 nt, synthetic construct
  source 1..22: mol_type = other RNA
agcgtgcataagttaacttcca

SEQ ID NO: 1739 - RNA, 22 nt, synthetic construct
  source 1..22: mol_type = other RNA
agcttgttaagatagttaagcg

SEQ ID NO: 1740 - RNA, 22 nt, synthetic construct
  source 1..22: mol_type = other RNA
agctttgagtgcaagagattga

SEQ ID NO: 1741 - RNA, 22 nt, synthetic construct
  source 1..22: mol_type = other RNA
aggcatggttgtggttaatctg

SEQ ID NO: 1742 - RNA, 22 nt, synthetic construct
  source 1..22: mol_type = other RNA
aggtggggagcagagaattctc

SEQ ID NO: 1743 - RNA, 22 nt, synthetic construct
  source 1..22: mol_type = other RNA
agtaaggcatggttgtggttaa

SEQ ID NO: 1744 - RNA, 22 nt, synthetic construct
  source 1..22: mol_type = other RNA
agtatgtaaattggaagttaac

SEQ ID NO: 1745 - RNA, 22 nt, synthetic construct
  source 1..22: mol_type = other RNA
agtgcaagagattgaagagttc

SEQ ID NO: 1746 - RNA, 22 nt, synthetic construct
  source 1..22: mol_type = other RNA
agttaacttatgcacgcttaac

SEQ ID NO: 1747 - RNA, 22 nt, synthetic construct
  source 1..22: mol_type = other RNA
agttaacttccaatttacatac

SEQ ID NO: 1748 - RNA, 22 nt, synthetic construct
  source 1..22: mol_type = other RNA
agttaagcgtgcataagttaac

SEQ ID NO: 1749 - RNA, 22 nt, synthetic construct
  source 1..22: mol_type = other RNA
agttcaaatctgaccaagatgt

SEQ ID NO: 1750 - RNA, 22 nt, synthetic construct
  source 1..22: mol_type = other RNA
ataaaccagattaaccacaacc

SEQ ID NO: 1751 - RNA, 22 nt, synthetic construct
  source 1..22: mol_type = other RNA
ataaagtaaggcatggttgtgg

SEQ ID NO: 1752 - RNA, 22 nt, synthetic construct
  source 1..22: mol_type = other RNA
ataagagaattctctgctcccc

SEQ ID NO: 1753 - RNA, 22 nt, synthetic construct
  source 1..22: mol_type = other RNA
ataattgacaggattattggaa

SEQ ID NO: 1754 - RNA, 22 nt, synthetic construct
  source 1..22: mol_type = other RNA
atacatttgataaagtaaggca

SEQ ID NO: 1755 - RNA, 22 nt, synthetic construct
  source 1..22: mol_type = other RNA
atactctgcttagaatttgggg

SEQ ID NO: 1756 - RNA, 22 nt, synthetic construct
  source 1..22: mol_type = other RNA
atagttaagcgtgcataagtta

SEQ ID NO: 1757 - RNA, 22 nt, synthetic construct
  source 1..22: mol_type = other RNA
atataattgacaggattattgg

SEQ ID NO: 1758 - RNA, 22 nt, synthetic construct
  source 1..22: mol_type = other RNA
atatttctaaattttcccccaa

SEQ ID NO: 1759 - RNA, 22 nt, synthetic construct
  source 1..22: mol_type = other RNA
atcaacatcttggtcagatttg

SEQ ID NO: 1760 - RNA, 22 nt, synthetic construct
  source 1..22: mol_type = other RNA
atccaacatcaacatcttggtc

SEQ ID NO: 1761 - RNA, 22 nt, synthetic construct
  source 1..22: mol_type = other RNA
atctcttgcactcaaagcttgt

SEQ ID NO: 1762 - RNA, 22 nt, synthetic construct
  source 1..22: mol_type = other RNA
atctgaccaagatgttgatgtt

SEQ ID NO: 1763 - RNA, 22 nt, synthetic construct
  source 1..22: mol_type = other RNA
atctggtttatttttgttccac

SEQ ID NO: 1764 - RNA, 22 nt, synthetic construct
  source 1..22: mol_type = other RNA
atcttaacaagctttgagtgca

SEQ ID NO: 1765 - RNA, 22 nt, synthetic construct
  source 1..22: mol_type = other RNA
atcttggtcagatttgaactct

SEQ ID NO: 1766 - RNA, 22 nt, synthetic construct
  source 1..22: mol_type = other RNA
atgcacgcttaactatcttaac

SEQ ID NO: 1767 - RNA, 22 nt, synthetic construct
  source 1..22: mol_type = other RNA
atgccttactttatcaaatgta

SEQ ID NO: 1768 - RNA, 22 nt, synthetic construct
  source 1..22: mol_type = other RNA
atggttgtggttaatctggttt

SEQ ID NO: 1769 - RNA, 22 nt, synthetic construct
  source 1..22: mol_type = other RNA
atgttgatgttggataagagaa

SEQ ID NO: 1770 - RNA, 22 nt, synthetic construct
  source 1..22: mol_type = other RNA
atgttggataagagaattctct

SEQ ID NO: 1771 - RNA, 22 nt, synthetic construct
  source 1..22: mol_type = other RNA
attaaccacaaccatgccttac

SEQ ID NO: 1772 - RNA, 22 nt, synthetic construct
  source 1..22: mol_type = other RNA
attctaagcagagtatgtaaat

SEQ ID NO: 1773 - RNA, 22 nt, synthetic construct
  source 1..22: mol_type = other RNA
attctcttatccaacatcaaca

SEQ ID NO: 1774 - RNA, 22 nt, synthetic construct
  source 1..22: mol_type = other RNA
attgaagagttcaaatctgacc

SEQ ID NO: 1775 - RNA, 22 nt, synthetic construct
  source 1..22: mol_type = other RNA
attgacaggattattggaaatt

SEQ ID NO: 1776 - RNA, 22 nt, synthetic construct
  source 1..22: mol_type = other RNA
attggaagttaacttatgcacg

SEQ ID NO: 1777 - RNA, 22 nt, synthetic construct
  source 1..22: mol_type = other RNA
atttacatactctgcttagaat

SEQ ID NO: 1778 - RNA, 22 nt, synthetic construct
  source 1..22: mol_type = other RNA
atttccaataatcctgtcaatt

SEQ ID NO: 1779 - RNA, 22 nt, synthetic construct
  source 1..22: mol_type = other RNA
atttctaaattttcccccaaat

SEQ ID NO: 1780 - RNA, 22 nt, synthetic construct
  source 1..22: mol_type = other RNA
atttgaactcttcaatctcttg

SEQ ID NO: 1781 - RNA, 22 nt, synthetic construct
  source 1..22: mol_type = other RNA
atttgataaagtaaggcatggt

SEQ ID NO: 1782 - RNA, 22 nt, synthetic construct
  source 1..22: mol_type = other RNA
atttgggggaaaatttagaaat

SEQ ID NO: 1783 - RNA, 22 nt, synthetic construct
  source 1..22: mol_type = other RNA
attttcccccaaattctaagca

SEQ ID NO: 1784 - RNA, 22 nt, synthetic construct
  source 1..22: mol_type = other RNA
caaaaataaaccagattaacca

SEQ ID NO: 1785 - RNA, 22 nt, synthetic construct
  source 1..22: mol_type = other RNA
caaagcttgttaagatagttaa

SEQ ID NO: 1786 - RNA, 22 nt, synthetic construct
  source 1..22: mol_type = other RNA
caaatctgaccaagatgttgat

SEQ ID NO: 1787 - RNA, 22 nt, synthetic construct
  source 1..22: mol_type = other RNA
caaattctaagcagagtatgta

SEQ ID NO: 1788 - RNA, 22 nt, synthetic construct
  source 1..22: mol_type = other RNA
caaatttccaataatcctgtca

SEQ ID NO: 1789 - RNA, 22 nt, synthetic construct
  source 1..22: mol_type = other RNA
caacatcaacatcttggtcaga

SEQ ID NO: 1790 - RNA, 22 nt, synthetic construct
  source 1..22: mol_type = other RNA
caacatcttggtcagatttgaa

SEQ ID NO: 1791 - RNA, 22 nt, synthetic construct
  source 1..22: mol_type = other RNA
caaccatgccttactttatcaa

SEQ ID NO: 1792 - RNA, 22 nt, synthetic construct
  source 1..22: mol_type = other RNA
caagagattgaagagttcaaat

SEQ ID NO: 1793 - RNA, 22 nt, synthetic construct
  source 1..22: mol_type = other RNA
caagatgttgatgttggataag

SEQ ID NO: 1794 - RNA, 22 nt, synthetic construct
  source 1..22: mol_type = other RNA
caagctttgagtgcaagagatt

SEQ ID NO: 1795 - RNA, 22 nt, synthetic construct
  source 1..22: mol_type = other RNA
caatctcttgcactcaaagctt

SEQ ID NO: 1796 - RNA, 22 nt, synthetic construct
  source 1..22: mol_type = other RNA
caatttacatactctgcttaga

SEQ ID NO: 1797 - RNA, 22 nt, synthetic construct
  source 1..22: mol_type = other RNA
cacaaccatgccttactttatc

SEQ ID NO: 1798 - RNA, 22 nt, synthetic construct
  source 1..22: mol_type = other RNA
cacgcttaactatcttaacaag

SEQ ID NO: 1799 - RNA, 22 nt, synthetic construct
  source 1..22: mol_type = other RNA
cactcaaagcttgttaagatag

SEQ ID NO: 1800 - RNA, 22 nt, synthetic construct
  source 1..22: mol_type = other RNA
cagagaattctcttatccaaca

SEQ ID NO: 1801 - RNA, 22 nt, synthetic construct
  source 1..22: mol_type = other RNA
cagagtatgtaaattggaagtt

SEQ ID NO: 1802 - RNA, 22 nt, synthetic construct
  source 1..22: mol_type = other RNA
cagattaaccacaaccatgcct

SEQ ID NO: 1803 - RNA, 22 nt, synthetic construct
  source 1..22: mol_type = other RNA
cagatttgaactcttcaatctc

SEQ ID NO: 1804 - RNA, 22 nt, synthetic construct
  source 1..22: mol_type = other RNA
caggattattggaaatttgtta

SEQ ID NO: 1805 - RNA, 22 nt, synthetic construct
  source 1..22: mol_type = other RNA
cataagttaacttccaatttac

SEQ ID NO: 1806 - RNA, 22 nt, synthetic construct
  source 1..22: mol_type = other RNA
catactctgcttagaatttggg

SEQ ID NO: 1807 - RNA, 22 nt, synthetic construct
  source 1..22: mol_type = other RNA
catcaacatcttggtcagattt

SEQ ID NO: 1808 - RNA, 22 nt, synthetic construct
  source 1..22: mol_type = other RNA
catcttggtcagatttgaactc

SEQ ID NO: 1809 - RNA, 22 nt, synthetic construct
  source 1..22: mol_type = other RNA
catgccttactttatcaaatgt

SEQ ID NO: 1810 - RNA, 22 nt, synthetic construct
  source 1..22: mol_type = other RNA
catggttgtggttaatctggtt

SEQ ID NO: 1811 - RNA, 22 nt, synthetic construct
  source 1..22: mol_type = other RNA
catttgataaagtaaggcatgg

SEQ ID NO: 1812 - RNA, 22 nt, synthetic construct
  source 1..22: mol_type = other RNA
ccaaattctaagcagagtatgt

SEQ ID NO: 1813 - RNA, 22 nt, synthetic construct
  source 1..22: mol_type = other RNA
ccaacatcaacatcttggtcag

SEQ ID NO: 1814 - RNA, 22 nt, synthetic construct
  source 1..22: mol_type = other RNA
ccaagatgttgatgttggataa

SEQ ID NO: 1815 - RNA, 22 nt, synthetic construct
  source 1..22: mol_type = other RNA
ccaataatcctgtcaattatat

SEQ ID NO: 1816 - RNA, 22 nt, synthetic construct
  source 1..22: mol_type = other RNA
ccaatttacatactctgcttag

SEQ ID NO: 1817 - RNA, 22 nt, synthetic construct
  source 1..22: mol_type = other RNA
ccacaaccatgccttactttat

SEQ ID NO: 1818 - RNA, 22 nt, synthetic construct
  source 1..22: mol_type = other RNA
ccagattaaccacaaccatgcc

SEQ ID NO: 1819 - RNA, 22 nt, synthetic construct
  source 1..22: mol_type = other RNA
ccatgccttactttatcaaatg

SEQ ID NO: 1820 - RNA, 22 nt, synthetic construct
  source 1..22: mol_type = other RNA
cccaaattctaagcagagtatg

SEQ ID NO: 1821 - RNA, 22 nt, synthetic construct
  source 1..22: mol_type = other RNA
ccccaaattctaagcagagtat

SEQ ID NO: 1822 - RNA, 22 nt, synthetic construct
  source 1..22: mol_type = other RNA
cccccaaattctaagcagagta

SEQ ID NO: 1823 - RNA, 22 nt, synthetic construct
  source 1..22: mol_type = other RNA
cgcttaactatcttaacaagct

SEQ ID NO: 1824 - RNA, 22 nt, synthetic construct
  source 1..22: mol_type = other RNA
cgtgcataagttaacttccaat

SEQ ID NO: 1825 - RNA, 22 nt, synthetic construct
  source 1..22: mol_type = other RNA
ctaaattttcccccaaattcta

SEQ ID NO: 1826 - RNA, 22 nt, synthetic construct
  source 1..22: mol_type = other RNA
ctaagcagagtatgtaaattgg

SEQ ID NO: 1827 - RNA, 22 nt, synthetic construct
  source 1..22: mol_type = other RNA
ctatcttaacaagctttgagtg

SEQ ID NO: 1828 - RNA, 22 nt, synthetic construct
  source 1..22: mol_type = other RNA
ctcaaagcttgttaagatagtt

SEQ ID NO: 1829 - RNA, 22 nt, synthetic construct
  source 1..22: mol_type = other RNA
ctctgcttagaatttgggggaa

SEQ ID NO: 1830 - RNA, 22 nt, synthetic construct
  source 1..22: mol_type = other RNA
ctcttatccaacatcaacatct

SEQ ID NO: 1831 - RNA, 22 nt, synthetic construct
  source 1..22: mol_type = other RNA
ctcttcaatctcttgcactcaa

SEQ ID NO: 1832 - RNA, 22 nt, synthetic construct
  source 1..22: mol_type = other RNA
ctcttgcactcaaagcttgtta

SEQ ID NO: 1833 - RNA, 22 nt, synthetic construct
  source 1..22: mol_type = other RNA
ctgaccaagatgttgatgttgg

SEQ ID NO: 1834 - RNA, 22 nt, synthetic construct
  source 1..22: mol_type = other RNA
ctgcttagaatttgggggaaaa

SEQ ID NO: 1835 - RNA, 22 nt, synthetic construct
  source 1..22: mol_type = other RNA
ctggtttatttttgttccacaa

SEQ ID NO: 1836 - RNA, 22 nt, synthetic construct
  source 1..22: mol_type = other RNA
cttaacaagctttgagtgcaag

SEQ ID NO: 1837 - RNA, 22 nt, synthetic construct
  source 1..22: mol_type = other RNA
cttaactatcttaacaagcttt

SEQ ID NO: 1838 - RNA, 22 nt, synthetic construct
  source 1..22: mol_type = other RNA
cttagaatttgggggaaaattt

SEQ ID NO: 1839 - RNA, 22 nt, synthetic construct
  source 1..22: mol_type = other RNA
cttagaggtggggagcagagaa

SEQ ID NO: 1840 - RNA, 22 nt, synthetic construct
  source 1..22: mol_type = other RNA
cttatccaacatcaacatcttg

SEQ ID NO: 1841 - RNA, 22 nt, synthetic construct
  source 1..22: mol_type = other RNA
cttatgcacgcttaactatctt

SEQ ID NO: 1842 - RNA, 22 nt, synthetic construct
  source 1..22: mol_type = other RNA
cttcaatctcttgcactcaaag

SEQ ID NO: 1843 - RNA, 22 nt, synthetic construct
  source 1..22: mol_type = other RNA
cttccaatttacatactctgct

SEQ ID NO: 1844 - RNA, 22 nt, synthetic construct
  source 1..22: mol_type = other RNA
cttgcactcaaagcttgttaag

SEQ ID NO: 1845 - RNA, 22 nt, synthetic construct
  source 1..22: mol_type = other RNA
cttggtcagatttgaactcttc

SEQ ID NO: 1846 - RNA, 22 nt, synthetic construct
  source 1..22: mol_type = other RNA
cttgtggaacaaaaataaacca

SEQ ID NO: 1847 - RNA, 22 nt, synthetic construct
  source 1..22: mol_type = other RNA
cttgttaagatagttaagcgtg

SEQ ID NO: 1848 - RNA, 22 nt, synthetic construct
  source 1..22: mol_type = other RNA
ctttgagtgcaagagattgaag

SEQ ID NO: 1849 - RNA, 22 nt, synthetic construct
  source 1..22: mol_type = other RNA
gaactcttcaatctcttgcact

SEQ ID NO: 1850 - RNA, 22 nt, synthetic construct
  source 1..22: mol_type = other RNA
gaagagttcaaatctgaccaag

SEQ ID NO: 1851 - RNA, 22 nt, synthetic construct
  source 1..22: mol_type = other RNA
gaagttaacttatgcacgctta

SEQ ID NO: 1852 - RNA, 22 nt, synthetic construct
  source 1..22: mol_type = other RNA
gaattctcttatccaacatcaa

SEQ ID NO: 1853 - RNA, 22 nt, synthetic construct
  source 1..22: mol_type = other RNA
gaatttgggggaaaatttagaa

SEQ ID NO: 1854 - RNA, 22 nt, synthetic construct
  source 1..22: mol_type = other RNA
gacaggattattggaaatttgt

SEQ ID NO: 1855 - RNA, 22 nt, synthetic construct
  source 1..22: mol_type = other RNA
gaccaagatgttgatgttggat

SEQ ID NO: 1856 - RNA, 22 nt, synthetic construct
  source 1..22: mol_type = other RNA
gagaattctcttatccaacatc

SEQ ID NO: 1857 - RNA, 22 nt, synthetic construct
  source 1..22: mol_type = other RNA
gagattgaagagttcaaatctg

SEQ ID NO: 1858 - RNA, 22 nt, synthetic construct
  source 1..22: mol_type = other RNA
gagcagagaattctcttatcca

SEQ ID NO: 1859 - RNA, 22 nt, synthetic construct
  source 1..22: mol_type = other RNA
gaggtggggagcagagaattct

SEQ ID NO: 1860 - RNA, 22 nt, synthetic construct
  source 1..22: mol_type = other RNA
gagtatgtaaattggaagttaa

SEQ ID NO: 1861 - RNA, 22 nt, synthetic construct
  source 1..22: mol_type = other RNA
gagtgcaagagattgaagagtt

SEQ ID NO: 1862 - RNA, 22 nt, synthetic construct
  source 1..22: mol_type = other RNA
gagttcaaatctgaccaagatg

SEQ ID NO: 1863 - RNA, 22 nt, synthetic construct
  source 1..22: mol_type = other RNA
gataaagtaaggcatggttgtg

SEQ ID NO: 1864 - RNA, 22 nt, synthetic construct
  source 1..22: mol_type = other RNA
gataagagaattctctgctccc

SEQ ID NO: 1865 - RNA, 22 nt, synthetic construct
  source 1..22: mol_type = other RNA
gatagttaagcgtgcataagtt

SEQ ID NO: 1866 - RNA, 22 nt, synthetic construct
  source 1..22: mol_type = other RNA
gatgttgatgttggataagaga

SEQ ID NO: 1867 - RNA, 22 nt, synthetic construct
  source 1..22: mol_type = other RNA
gatgttggataagagaattctc

SEQ ID NO: 1868 - RNA, 22 nt, synthetic construct
  source 1..22: mol_type = other RNA
gattaaccacaaccatgcctta

SEQ ID NO: 1869 - RNA, 22 nt, synthetic construct
  source 1..22: mol_type = other RNA
gattgaagagttcaaatctgac

SEQ ID NO: 1870 - RNA, 22 nt, synthetic construct
  source 1..22: mol_type = other RNA
gatttatttaacttgtggaaca

SEQ ID NO: 1871 - RNA, 22 nt, synthetic construct
  source 1..22: mol_type = other RNA
gatttgaactcttcaatctctt

SEQ ID NO: 1872 - RNA, 22 nt, synthetic construct
  source 1..22: mol_type = other RNA
gcaagagattgaagagttcaaa

SEQ ID NO: 1873 - RNA, 22 nt, synthetic construct
  source 1..22: mol_type = other RNA
gcacgcttaactatcttaacaa

SEQ ID NO: 1874 - RNA, 22 nt, synthetic construct
  source 1..22: mol_type = other RNA
gcactcaaagcttgttaagata

SEQ ID NO: 1875 - RNA, 22 nt, synthetic construct
  source 1..22: mol_type = other RNA
gcagagaattctcttatccaac

SEQ ID NO: 1876 - RNA, 22 nt, synthetic construct
  source 1..22: mol_type = other RNA
gcagagtatgtaaattggaagt

SEQ ID NO: 1877 - RNA, 22 nt, synthetic construct
  source 1..22: mol_type = other RNA
gcataagttaacttccaattta

SEQ ID NO: 1878 - RNA, 22 nt, synthetic construct
  source 1..22: mol_type = other RNA
gcatggttgtggttaatctggt

SEQ ID NO: 1879 - RNA, 22 nt, synthetic construct
  source 1..22: mol_type = other RNA
gccttactttatcaaatgtata

SEQ ID NO: 1880 - RNA, 22 nt, synthetic construct
  source 1..22: mol_type = other RNA
gcgtgcataagttaacttccaa

SEQ ID NO: 1881 - RNA, 22 nt, synthetic construct
  source 1..22: mol_type = other RNA
gcttaactatcttaacaagctt

SEQ ID NO: 1882 - RNA, 22 nt, synthetic construct
  source 1..22: mol_type = other RNA
gcttagaatttgggggaaaatt

SEQ ID NO: 1883 - RNA, 22 nt, synthetic construct
  source 1..22: mol_type = other RNA
gcttgttaagatagttaagcgt

SEQ ID NO: 1884 - RNA, 22 nt, synthetic construct
  source 1..22: mol_type = other RNA
gctttgagtgcaagagattgaa

SEQ ID NO: 1885 - RNA, 22 nt, synthetic construct
  source 1..22: mol_type = other RNA
ggaacaaaaataaaccagatta

SEQ ID NO: 1886 - RNA, 22 nt, synthetic construct
  source 1..22: mol_type = other RNA
ggaagttaacttatgcacgctt

SEQ ID NO: 1887 - RNA, 22 nt, synthetic construct
  source 1..22: mol_type = other RNA
ggagcagagaattctcttatcc

SEQ ID NO: 1888 - RNA, 22 nt, synthetic construct
  source 1..22: mol_type = other RNA
ggataagagaattctctgctcc

SEQ ID NO: 1889 - RNA, 22 nt, synthetic construct
  source 1..22: mol_type = other RNA
ggcatggttgtggttaatctgg

SEQ ID NO: 1890 - RNA, 22 nt, synthetic construct
  source 1..22: mol_type = other RNA
gggagcagagaattctcttatc

SEQ ID NO: 1891 - RNA, 22 nt, synthetic construct
  source 1..22: mol_type = other RNA
ggggagcagagaattctcttat

SEQ ID NO: 1892 - RNA, 22 nt, synthetic construct
  source 1..22: mol_type = other RNA
gggggaaaatttagaaatataa

SEQ ID NO: 1893 - RNA, 22 nt, synthetic construct
  source 1..22: mol_type = other RNA
ggtcagatttgaactcttcaat

SEQ ID NO: 1894 - RNA, 22 nt, synthetic construct
  source 1..22: mol_type = other RNA
ggtggggagcagagaattctct

SEQ ID NO: 1895 - RNA, 22 nt, synthetic construct
  source 1..22: mol_type = other RNA
ggttaatctggtttatttttgt

SEQ ID NO: 1896 - RNA, 22 nt, synthetic construct
  source 1..22: mol_type = other RNA
ggttgtggttaatctggtttat

SEQ ID NO: 1897 - RNA, 22 nt, synthetic construct
  source 1..22: mol_type = other RNA
ggtttatttttgttccacaagt

SEQ ID NO: 1898 - RNA, 22 nt, synthetic construct
  source 1..22: mol_type = other RNA
gtaaattggaagttaacttatg

SEQ ID NO: 1899 - RNA, 22 nt, synthetic construct
  source 1..22: mol_type = other RNA
gtaaggcatggttgtggttaat

SEQ ID NO: 1900 - RNA, 22 nt, synthetic construct
  source 1..22: mol_type = other RNA
gtatgtaaattggaagttaact

SEQ ID NO: 1901 - RNA, 22 nt, synthetic construct
  source 1..22: mol_type = other RNA
gtcagatttgaactcttcaatc

SEQ ID NO: 1902 - RNA, 22 nt, synthetic construct
  source 1..22: mol_type = other RNA
gtgcaagagattgaagagttca

SEQ ID NO: 1903 - RNA, 22 nt, synthetic construct
  source 1..22: mol_type = other RNA
gtgcataagttaacttccaatt

SEQ ID NO: 1904 - RNA, 22 nt, synthetic construct
  source 1..22: mol_type = other RNA
gtggaacaaaaataaaccagat

SEQ ID NO: 1905 - RNA, 22 nt, synthetic construct
  source 1..22: mol_type = other RNA
gtggggagcagagaattctctt

SEQ ID NO: 1906 - RNA, 22 nt, synthetic construct
  source 1..22: mol_type = other RNA
gtggttaatctggtttattttt

SEQ ID NO: 1907 - RNA, 22 nt, synthetic construct
  source 1..22: mol_type = other RNA
gttaacttatgcacgcttaact

SEQ ID NO: 1908 - RNA, 22 nt, synthetic construct
  source 1..22: mol_type = other RNA
gttaacttccaatttacatact

SEQ ID NO: 1909 - RNA, 22 nt, synthetic construct
  source 1..22: mol_type = other RNA
gttaagatagttaagcgtgcat

SEQ ID NO: 1910 - RNA, 22 nt, synthetic construct
  source 1..22: mol_type = other RNA
gttaagcgtgcataagttaact

SEQ ID NO: 1911 - RNA, 22 nt, synthetic construct
  source 1..22: mol_type = other RNA
gttcaaatctgaccaagatgtt

SEQ ID NO: 1912 - RNA, 22 nt, synthetic construct
  source 1..22: mol_type = other RNA
gttccacaagttaaataaatca

SEQ ID NO: 1913 - RNA, 22 nt, synthetic construct
  source 1..22: mol_type = other RNA
gttgatgttggataagagaatt

SEQ ID NO: 1914 - RNA, 22 nt, synthetic construct
  source 1..22: mol_type = other RNA
gttggataagagaattctctgc

SEQ ID NO: 1915 - RNA, 22 nt, synthetic construct
  source 1..22: mol_type = other RNA
gttgtggttaatctggtttatt

SEQ ID NO: 1916 - RNA, 22 nt, synthetic construct
  source 1..22: mol_type = other RNA
gtttatttttgttccacaagtt

SEQ ID NO: 1917 - RNA, 22 nt, synthetic construct
  source 1..22: mol_type = other RNA
taaaccagattaaccacaacca

SEQ ID NO: 1918 - RNA, 22 nt, synthetic construct
  source 1..22: mol_type = other RNA
taaagtaaggcatggttgtggt

SEQ ID NO: 1919 - RNA, 22 nt, synthetic construct
  source 1..22: mol_type = other RNA
taaattggaagttaacttatgc

SEQ ID NO: 1920 - RNA, 22 nt, synthetic construct
  source 1..22: mol_type = other RNA
taaattttcccccaaattctaa

SEQ ID NO: 1921 - RNA, 22 nt, synthetic construct
  source 1..22: mol_type = other RNA
taacaaatttccaataatcctg

SEQ ID NO: 1922 - RNA, 22 nt, synthetic construct
  source 1..22: mol_type = other RNA
taacaagctttgagtgcaagag

SEQ ID NO: 1923 - RNA, 22 nt, synthetic construct
  source 1..22: mol_type = other RNA
taaccacaaccatgccttactt

SEQ ID NO: 1924 - RNA, 22 nt, synthetic construct
  source 1..22: mol_type = other RNA
taactatcttaacaagctttga

SEQ ID NO: 1925 - RNA, 22 nt, synthetic construct
  source 1..22: mol_type = other RNA
taacttatgcacgcttaactat

SEQ ID NO: 1926 - RNA, 22 nt, synthetic construct
  source 1..22: mol_type = other RNA
taacttccaatttacatactct

SEQ ID NO: 1927 - RNA, 22 nt, synthetic construct
  source 1..22: mol_type = other RNA
taagagaattctctgctcccca

SEQ ID NO: 1928 - RNA, 22 nt, synthetic construct
  source 1..22: mol_type = other RNA
taagatagttaagcgtgcataa

SEQ ID NO: 1929 - RNA, 22 nt, synthetic construct
  source 1..22: mol_type = other RNA
taagcagagtatgtaaattgga

SEQ ID NO: 1930 - RNA, 22 nt, synthetic construct
  source 1..22: mol_type = other RNA
taagcgtgcataagttaacttc

SEQ ID NO: 1931 - RNA, 22 nt, synthetic construct
  source 1..22: mol_type = other RNA
taaggcatggttgtggttaatc

SEQ ID NO: 1932 - RNA, 22 nt, synthetic construct
  source 1..22: mol_type = other RNA
taatctggtttatttttgttcc

SEQ ID NO: 1933 - RNA, 22 nt, synthetic construct
  source 1..22: mol_type = other RNA
taattgacaggattattggaaa

SEQ ID NO: 1934 - RNA, 22 nt, synthetic construct
  source 1..22: mol_type = other RNA
tacatactctgcttagaatttg

SEQ ID NO: 1935 - RNA, 22 nt, synthetic construct
  source 1..22: mol_type = other RNA
tacatttgataaagtaaggcat

SEQ ID NO: 1936 - RNA, 22 nt, synthetic construct
  source 1..22: mol_type = other RNA
tactctgcttagaatttggggg

SEQ ID NO: 1937 - RNA, 22 nt, synthetic construct
  source 1..22: mol_type = other RNA
tagaatttgggggaaaatttag

SEQ ID NO: 1938 - RNA, 22 nt, synthetic construct
  source 1..22: mol_type = other RNA
tagaggtggggagcagagaatt

SEQ ID NO: 1939 - RNA, 22 nt, synthetic construct
  source 1..22: mol_type = other RNA
tagttaagcgtgcataagttaa

SEQ ID NO: 1940 - RNA, 22 nt, synthetic construct
  source 1..22: mol_type = other RNA
tataattgacaggattattgga

SEQ ID NO: 1941 - RNA, 22 nt, synthetic construct
  source 1..22: mol_type = other RNA
tatacatttgataaagtaaggc

SEQ ID NO: 1942 - RNA, 22 nt, synthetic construct
  source 1..22: mol_type = other RNA
tatatttctaaattttccccca

SEQ ID NO: 1943 - RNA, 22 nt, synthetic construct
  source 1..22: mol_type = other RNA
tatccaacatcaacatcttggt

SEQ ID NO: 1944 - RNA, 22 nt, synthetic construct
  source 1..22: mol_type = other RNA
tatcttaacaagctttgagtgc

SEQ ID NO: 1945 - RNA, 22 nt, synthetic construct
  source 1..22: mol_type = other RNA
tatgcacgcttaactatcttaa

SEQ ID NO: 1946 - RNA, 22 nt, synthetic construct
  source 1..22: mol_type = other RNA
tatttctaaattttcccccaaa

SEQ ID NO: 1947 - RNA, 22 nt, synthetic construct
  source 1..22: mol_type = other RNA
tcaaagcttgttaagatagtta

SEQ ID NO: 1948 - RNA, 22 nt, synthetic construct
  source 1..22: mol_type = other RNA
tcaaatctgaccaagatgttga

SEQ ID NO: 1949 - RNA, 22 nt, synthetic construct
  source 1..22: mol_type = other RNA
tcaacatcttggtcagatttga

SEQ ID NO: 1950 - RNA, 22 nt, synthetic construct
  source 1..22: mol_type = other RNA
tcaatctcttgcactcaaagct

SEQ ID NO: 1951 - RNA, 22 nt, synthetic construct
  source 1..22: mol_type = other RNA
tcagatttgaactcttcaatct

SEQ ID NO: 1952 - RNA, 22 nt, synthetic construct
  source 1..22: mol_type = other RNA
tccaacatcaacatcttggtca

SEQ ID NO: 1953 - RNA, 22 nt, synthetic construct
  source 1..22: mol_type = other RNA
tccaataatcctgtcaattata

SEQ ID NO: 1954 - RNA, 22 nt, synthetic construct
  source 1..22: mol_type = other RNA
tccaatttacatactctgctta

SEQ ID NO: 1955 - RNA, 22 nt, synthetic construct
  source 1..22: mol_type = other RNA
tcccccaaattctaagcagagt

SEQ ID NO: 1956 - RNA, 22 nt, synthetic construct
  source 1..22: mol_type = other RNA
tctaaattttcccccaaattct

SEQ ID NO: 1957 - RNA, 22 nt, synthetic construct
  source 1..22: mol_type = other RNA
tctaagcagagtatgtaaattg

SEQ ID NO: 1958 - RNA, 22 nt, synthetic construct
  source 1..22: mol_type = other RNA
tctcttatccaacatcaacatc

SEQ ID NO: 1959 - RNA, 22 nt, synthetic construct
  source 1..22: mol_type = other RNA
tctcttgcactcaaagcttgtt

SEQ ID NO: 1960 - RNA, 22 nt, synthetic construct
  source 1..22: mol_type = other RNA
tctgaccaagatgttgatgttg

SEQ ID NO: 1961 - RNA, 22 nt, synthetic construct
  source 1..22: mol_type = other RNA
tctgcttagaatttgggggaaa

SEQ ID NO: 1962 - RNA, 22 nt, synthetic construct
  source 1..22: mol_type = other RNA
tctggtttatttttgttccaca

SEQ ID NO: 1963 - RNA, 22 nt, synthetic construct
  source 1..22: mol_type = other RNA
tcttaacaagctttgagtgcaa

SEQ ID NO: 1964 - RNA, 22 nt, synthetic construct
  source 1..22: mol_type = other RNA
tcttatccaacatcaacatctt

SEQ ID NO: 1965 - RNA, 22 nt, synthetic construct
  source 1..22: mol_type = other RNA
tcttcaatctcttgcactcaaa

SEQ ID NO: 1966 - RNA, 22 nt, synthetic construct
  source 1..22: mol_type = other RNA
tcttgcactcaaagcttgttaa

SEQ ID NO: 1967 - RNA, 22 nt, synthetic construct
  source 1..22: mol_type = other RNA
tcttggtcagatttgaactctt

SEQ ID NO: 1968 - RNA, 22 nt, synthetic construct
  source 1..22: mol_type = other RNA
tgaactcttcaatctcttgcac

SEQ ID NO: 1969 - RNA, 22 nt, synthetic construct
  source 1..22: mol_type = other RNA
tgaagagttcaaatctgaccaa

SEQ ID NO: 1970 - RNA, 22 nt, synthetic construct
  source 1..22: mol_type = other RNA
tgacaggattattggaaatttg

SEQ ID NO: 1971 - RNA, 22 nt, synthetic construct
  source 1..22: mol_type = other RNA
tgaccaagatgttgatgttgga

SEQ ID NO: 1972 - RNA, 22 nt, synthetic construct
  source 1..22: mol_type = other RNA
tgagtgcaagagattgaagagt

SEQ ID NO: 1973 - RNA, 22 nt, synthetic construct
  source 1..22: mol_type = other RNA
tgataaagtaaggcatggttgt

SEQ ID NO: 1974 - RNA, 22 nt, synthetic construct
  source 1..22: mol_type = other RNA
tgatgttggataagagaattct

SEQ ID NO: 1975 - RNA, 22 nt, synthetic construct
  source 1..22: mol_type = other RNA
tgatttatttaacttgtggaac

SEQ ID NO: 1976 - RNA, 22 nt, synthetic construct
  source 1..22: mol_type = other RNA
tgcaagagattgaagagttcaa

SEQ ID NO: 1977 - RNA, 22 nt, synthetic construct
  source 1..22: mol_type = other RNA
tgcacgcttaactatcttaaca

SEQ ID NO: 1978 - RNA, 22 nt, synthetic construct
  source 1..22: mol_type = other RNA
tgcactcaaagcttgttaagat

SEQ ID NO: 1979 - RNA, 22 nt, synthetic construct
  source 1..22: mol_type = other RNA
tgcataagttaacttccaattt

SEQ ID NO: 1980 - RNA, 22 nt, synthetic construct
  source 1..22: mol_type = other RNA
tgccttactttatcaaatgtat

SEQ ID NO: 1981 - RNA, 22 nt, synthetic construct
  source 1..22: mol_type = other RNA
tgcttagaatttgggggaaaat

SEQ ID NO: 1982 - RNA, 22 nt, synthetic construct
  source 1..22: mol_type = other RNA
tggaacaaaaataaaccagatt

SEQ ID NO: 1983 - RNA, 22 nt, synthetic construct
  source 1..22: mol_type = other RNA
tggaagttaacttatgcacgct

SEQ ID NO: 1984 - RNA, 22 nt, synthetic construct
  source 1..22: mol_type = other RNA
tggataagagaattctctgctc

SEQ ID NO: 1985 - RNA, 22 nt, synthetic construct
  source 1..22: mol_type = other RNA
tggggagcagagaattctctta

SEQ ID NO: 1986 - RNA, 22 nt, synthetic construct
  source 1..22: mol_type = other RNA
tgggggaaaatttagaaatata

SEQ ID NO: 1987 - RNA, 22 nt, synthetic construct
  source 1..22: mol_type = other RNA
tggtcagatttgaactcttcaa

SEQ ID NO: 1988 - RNA, 22 nt, synthetic construct
  source 1..22: mol_type = other RNA
tggttaatctggtttatttttg

SEQ ID NO: 1989 - RNA, 22 nt, synthetic construct
  source 1..22: mol_type = other RNA
tggttgtggttaatctggttta

SEQ ID NO: 1990 - RNA, 22 nt, synthetic construct
  source 1..22: mol_type = other RNA
tggtttatttttgttccacaag

SEQ ID NO: 1991 - RNA, 22 nt, synthetic construct
  source 1..22: mol_type = other RNA
tgtggaacaaaaataaaccaga

SEQ ID NO: 1992 - RNA, 22 nt, synthetic construct
  source 1..22: mol_type = other RNA
tgtggttaatctggtttatttt

SEQ ID NO: 1993 - RNA, 22 nt, synthetic construct
  source 1..22: mol_type = other RNA
tgttaagatagttaagcgtgca

SEQ ID NO: 1994 - RNA, 22 nt, synthetic construct
  source 1..22: mol_type = other RNA
tgttccacaagttaaataaatc

SEQ ID NO: 1995 - RNA, 22 nt, synthetic construct
  source 1..22: mol_type = other RNA
tgttgatgttggataagagaat

SEQ ID NO: 1996 - RNA, 22 nt, synthetic construct
  source 1..22: mol_type = other RNA
tgttggataagagaattctctg

SEQ ID NO: 1997 - RNA, 22 nt, synthetic construct
  source 1..22: mol_type = other RNA
ttaacaagctttgagtgcaaga

SEQ ID NO: 1998 - RNA, 22 nt, synthetic construct
  source 1..22: mol_type = other RNA
ttaaccacaaccatgccttact

SEQ ID NO: 1999 - RNA, 22 nt, synthetic construct
  source 1..22: mol_type = other RNA
ttaactatcttaacaagctttg

SEQ ID NO: 2000 - RNA, 22 nt, synthetic construct
  source 1..22: mol_type = other RNA
ttaacttatgcacgcttaacta

SEQ ID NO: 2001 - RNA, 22 nt, synthetic construct
  source 1..22: mol_type = other RNA
ttaacttccaatttacatactc

SEQ ID NO: 2002 - RNA, 22 nt, synthetic construct
  source 1..22: mol_type = other RNA
ttaagatagttaagcgtgcata

SEQ ID NO: 2003 - RNA, 22 nt, synthetic construct
  source 1..22: mol_type = other RNA
ttaagcgtgcataagttaactt

SEQ ID NO: 2004 - RNA, 22 nt, synthetic construct
  source 1..22: mol_type = other RNA
ttacatactctgcttagaattt

SEQ ID NO: 2005 - RNA, 22 nt, synthetic construct
  source 1..22: mol_type = other RNA
ttagaatttgggggaaaattta

SEQ ID NO: 2006 - RNA, 22 nt, synthetic construct
  source 1..22: mol_type = other RNA
ttagaggtggggagcagagaat

SEQ ID NO: 2007 - RNA, 22 nt, synthetic construct
  source 1..22: mol_type = other RNA
ttatatttctaaattttccccc

SEQ ID NO: 2008 - RNA, 22 nt, synthetic construct
  source 1..22: mol_type = other RNA
ttatccaacatcaacatcttgg

SEQ ID NO: 2009 - RNA, 22 nt, synthetic construct
  source 1..22: mol_type = other RNA
ttatgcacgcttaactatctta

SEQ ID NO: 2010 - RNA, 22 nt, synthetic construct
  source 1..22: mol_type = other RNA
ttcaaatctgaccaagatgttg

SEQ ID NO: 2011 - RNA, 22 nt, synthetic construct
  source 1..22: mol_type = other RNA
ttcaatctcttgcactcaaagc

SEQ ID NO: 2012 - RNA, 22 nt, synthetic construct
  source 1..22: mol_type = other RNA
ttccaataatcctgtcaattat

SEQ ID NO: 2013 - RNA, 22 nt, synthetic construct
  source 1..22: mol_type = other RNA
ttccaatttacatactctgctt

SEQ ID NO: 2014 - RNA, 22 nt, synthetic construct
  source 1..22: mol_type = other RNA
ttcccccaaattctaagcagag

SEQ ID NO: 2015 - RNA, 22 nt, synthetic construct
  source 1..22: mol_type = other RNA
ttctaaattttcccccaaattc

SEQ ID NO: 2016 - RNA, 22 nt, synthetic construct
  source 1..22: mol_type = other RNA
ttctaagcagagtatgtaaatt

SEQ ID NO: 2017 - RNA, 22 nt, synthetic construct
  source 1..22: mol_type = other RNA
ttctcttatccaacatcaacat

SEQ ID NO: 2018 - RNA, 22 nt, synthetic construct
  source 1..22: mol_type = other RNA
ttgaactcttcaatctcttgca

SEQ ID NO: 2019 - RNA, 22 nt, synthetic construct
  source 1..22: mol_type = other RNA
ttgaagagttcaaatctgacca

SEQ ID NO: 2020 - RNA, 22 nt, synthetic construct
  source 1..22: mol_type = other RNA
ttgacaggattattggaaattt

SEQ ID NO: 2021 - RNA, 22 nt, synthetic construct
  source 1..22: mol_type = other RNA
ttgagtgcaagagattgaagag

SEQ ID NO: 2022 - RNA, 22 nt, synthetic construct
  source 1..22: mol_type = other RNA
ttgataaagtaaggcatggttg

SEQ ID NO: 2023 - RNA, 22 nt, synthetic construct
  source 1..22: mol_type = other RNA
ttgatgttggataagagaattc

SEQ ID NO: 2024 - RNA, 22 nt, synthetic construct
  source 1..22: mol_type = other RNA
ttgcactcaaagcttgttaaga

SEQ ID NO: 2025 - RNA, 22 nt, synthetic construct
  source 1..22: mol_type = other RNA
ttggaagttaacttatgcacgc

SEQ ID NO: 2026 - RNA, 22 nt, synthetic construct
  source 1..22: mol_type = other RNA
ttggataagagaattctctgct

SEQ ID NO: 2027 - RNA, 22 nt, synthetic construct
  source 1..22: mol_type = other RNA
ttgggggaaaatttagaaatat

SEQ ID NO: 2028 - RNA, 22 nt, synthetic construct
  source 1..22: mol_type = other RNA
ttggtcagatttgaactcttca

SEQ ID NO: 2029 - RNA, 22 nt, synthetic construct
  source 1..22: mol_type = other RNA
ttgtggaacaaaaataaaccag

SEQ ID NO: 2030 - RNA, 22 nt, synthetic construct
  source 1..22: mol_type = other RNA
ttgtggttaatctggtttattt

SEQ ID NO: 2031 - RNA, 22 nt, synthetic construct
  source 1..22: mol_type = other RNA
ttgttaagatagttaagcgtgc

SEQ ID NO: 2032 - RNA, 22 nt, synthetic construct
  source 1..22: mol_type = other RNA
tttacatactctgcttagaatt

SEQ ID NO: 2033 - RNA, 22 nt, synthetic construct
  source 1..22: mol_type = other RNA
tttccaataatcctgtcaatta

SEQ ID NO: 2034 - RNA, 22 nt, synthetic construct
  source 1..22: mol_type = other RNA
tttcccccaaattctaagcaga

SEQ ID NO: 2035 - RNA, 22 nt, synthetic construct
  source 1..22: mol_type = other RNA
tttctaaattttcccccaaatt

SEQ ID NO: 2036 - RNA, 22 nt, synthetic construct
  source 1..22: mol_type = other RNA
tttgaactcttcaatctcttgc

SEQ ID NO: 2037 - RNA, 22 nt, synthetic construct
  source 1..22: mol_type = other RNA
tttgagtgcaagagattgaaga

SEQ ID NO: 2038 - RNA, 22 nt, synthetic construct
  source 1..22: mol_type = other RNA
tttgataaagtaaggcatggtt

SEQ ID NO: 2039 - RNA, 22 nt, synthetic construct
  source 1..22: mol_type = other RNA
tttgggggaaaatttagaaata

SEQ ID NO: 2040 - RNA, 22 nt, synthetic construct
  source 1..22: mol_type = other RNA
ttttcccccaaattctaagcag

SEQ ID NO: 2041 - RNA, 20 nt, synthetic construct
  source 1..20: mol_type = other RNA
aaaaacattttctcaaggtc

SEQ ID NO: 2042 - RNA, 20 nt, synthetic construct
  source 1..20: mol_type = other RNA
aaaacaacattatacaaagg

SEQ ID NO: 2043 - RNA, 20 nt, synthetic construct
  source 1..20: mol_type = other RNA
aaaacattttctcaaggtca

SEQ ID NO: 2044 - RNA, 20 nt, synthetic construct
  source 1..20: mol_type = other RNA
aaaagagtggttcattttct

SEQ ID NO: 2045 - RNA, 20 nt, synthetic construct
  source 1..20: mol_type = other RNA
aaaagcctttggactccaac

SEQ ID NO: 2046 - RNA, 20 nt, synthetic construct
  source 1..20: mol_type = other RNA
aaaatgaaccactcttttcc

SEQ ID NO: 2047 - RNA, 20 nt, synthetic construct
  source 1..20: mol_type = other RNA
aaaatgttactctgtcaatg

SEQ ID NO: 2048 - RNA, 20 nt, synthetic construct
  source 1..20: mol_type = other RNA
aaaatgtttttgtttcactg

SEQ ID NO: 2049 - RNA, 20 nt, synthetic construct
  source 1..20: mol_type = other RNA
aaacaacattatacaaagga

SEQ ID NO: 2050 - RNA, 20 nt, synthetic construct
  source 1..20: mol_type = other RNA
aaacacagtccccatacagg

SEQ ID NO: 2051 - RNA, 20 nt, synthetic construct
  source 1..20: mol_type = other RNA
aaacagattgttataacttg

SEQ ID NO: 2052 - RNA, 20 nt, synthetic construct
  source 1..20: mol_type = other RNA
aaacattttctcaaggtcaa

SEQ ID NO: 2053 - RNA, 20 nt, synthetic construct
  source 1..20: mol_type = other RNA
aaaccccattcaaatctcct

SEQ ID NO: 2054 - RNA, 20 nt, synthetic construct
  source 1..20: mol_type = other RNA
aaacctaggtgttgtagcct

SEQ ID NO: 2055 - RNA, 20 nt, synthetic construct
  source 1..20: mol_type = other RNA
aaagaagaatcctacagggt

SEQ ID NO: 2056 - RNA, 20 nt, synthetic construct
  source 1..20: mol_type = other RNA
aaagagtggttcattttctc

SEQ ID NO: 2057 - RNA, 20 nt, synthetic construct
  source 1..20: mol_type = other RNA
aaagatcaaagccttgcagg

SEQ ID NO: 2058 - RNA, 20 nt, synthetic construct
  source 1..20: mol_type = other RNA
aaagatgcagagaagtccaa

SEQ ID NO: 2059 - RNA, 20 nt, synthetic construct
  source 1..20: mol_type = other RNA
aaagccttgcaggtaatgtg

SEQ ID NO: 2060 - RNA, 20 nt, synthetic construct
  source 1..20: mol_type = other RNA
aaagcctttggactccaact

SEQ ID NO: 2061 - RNA, 20 nt, synthetic construct
  source 1..20: mol_type = other RNA
aaaggaaaagagtggttcat

SEQ ID NO: 2062 - RNA, 20 nt, synthetic construct
  source 1..20: mol_type = other RNA
aaaggaactgccagtatggt

SEQ ID NO: 2063 - RNA, 20 nt, synthetic construct
  source 1..20: mol_type = other RNA
aaaggcaggtggttacccac

SEQ ID NO: 2064 - RNA, 20 nt, synthetic construct
  source 1..20: mol_type = other RNA
aaaggcttttcaatgaaatt

SEQ ID NO: 2065 - RNA, 20 nt, synthetic construct
  source 1..20: mol_type = other RNA
aaagggaaacagattgttat

SEQ ID NO: 2066 - RNA, 20 nt, synthetic construct
  source 1..20: mol_type = other RNA
aaatagtcctcaggacagtg

SEQ ID NO: 2067 - RNA, 20 nt, synthetic construct
  source 1..20: mol_type = other RNA
aaatcaattccctgttctag

SEQ ID NO: 2068 - RNA, 20 nt, synthetic construct
  source 1..20: mol_type = other RNA
aaatctcctgttatattcta

SEQ ID NO: 2069 - RNA, 20 nt, synthetic construct
  source 1..20: mol_type = other RNA
aaatgaaccactcttttcct

SEQ ID NO: 2070 - RNA, 20 nt, synthetic construct
  source 1..20: mol_type = other RNA
aaatgcttacacaaacctag

SEQ ID NO: 2071 - RNA, 20 nt, synthetic construct
  source 1..20: mol_type = other RNA
aaatggcagaagaaagatca

SEQ ID NO: 2072 - RNA, 20 nt, synthetic construct
  source 1..20: mol_type = other RNA
aaatgttactctgtcaatgt

SEQ ID NO: 2073 - RNA, 20 nt, synthetic construct
  source 1..20: mol_type = other RNA
aaatgtttttgtttcactgt

SEQ ID NO: 2074 - RNA, 20 nt, synthetic construct
  source 1..20: mol_type = other RNA
aaattctactgcccagggta

SEQ ID NO: 2075 - RNA, 20 nt, synthetic construct
  source 1..20: mol_type = other RNA
aaattgtagagccaggacct

SEQ ID NO: 2076 - RNA, 20 nt, synthetic construct
  source 1..20: mol_type = other RNA
aacaaaaacattttctcaag

SEQ ID NO: 2077 - RNA, 20 nt, synthetic construct
  source 1..20: mol_type = other RNA
aacaacattatacaaaggaa

SEQ ID NO: 2078 - RNA, 20 nt, synthetic construct
  source 1..20: mol_type = other RNA
aacaatctgtttccctttat

SEQ ID NO: 2079 - RNA, 20 nt, synthetic construct
  source 1..20: mol_type = other RNA
aacacagtccccatacagga

SEQ ID NO: 2080 - RNA, 20 nt, synthetic construct
  source 1..20: mol_type = other RNA
aacacatgactatattagag

SEQ ID NO: 2081 - RNA, 20 nt, synthetic construct
  source 1..20: mol_type = other RNA
aacacctaggtttgtgtaag

SEQ ID NO: 2082 - RNA, 20 nt, synthetic construct
  source 1..20: mol_type = other RNA
aacagattgttataacttga

SEQ ID NO: 2083 - RNA, 20 nt, synthetic construct
  source 1..20: mol_type = other RNA
aacaggagatttgaatgggg

SEQ ID NO: 2084 - RNA, 20 nt, synthetic construct
  source 1..20: mol_type = other RNA
aacaggctgtacaggtttgt

SEQ ID NO: 2085 - RNA, 20 nt, synthetic construct
  source 1..20: mol_type = other RNA
aacagggaattgatttggga

SEQ ID NO: 2086 - RNA, 20 nt, synthetic construct
  source 1..20: mol_type = other RNA
aacagtgtgactgggcagat

SEQ ID NO: 2087 - RNA, 20 nt, synthetic construct
  source 1..20: mol_type = other RNA
aacatgaccctgtaggattc

SEQ ID NO: 2088 - RNA, 20 nt, synthetic construct
  source 1..20: mol_type = other RNA
aacatgataaccctcactat

SEQ ID NO: 2089 - RNA, 20 nt, synthetic construct
  source 1..20: mol_type = other RNA
aacatgtccccgtcattaag

SEQ ID NO: 2090 - RNA, 20 nt, synthetic construct
  source 1..20: mol_type = other RNA
aacattatacaaaggaaaag

SEQ ID NO: 2091 - RNA, 20 nt, synthetic construct
  source 1..20: mol_type = other RNA
aacattgacagagtaacatt

SEQ ID NO: 2092 - RNA, 20 nt, synthetic construct
  source 1..20: mol_type = other RNA
aacattttagcagggaaaga

SEQ ID NO: 2093 - RNA, 20 nt, synthetic construct
  source 1..20: mol_type = other RNA
aaccacctgcctttatcctg

SEQ ID NO: 2094 - RNA, 20 nt, synthetic construct
  source 1..20: mol_type = other RNA
aaccactcttttcctttgta

SEQ ID NO: 2095 - RNA, 20 nt, synthetic construct
  source 1..20: mol_type = other RNA
aaccccattcaaatctcctg

SEQ ID NO: 2096 - RNA, 20 nt, synthetic construct
  source 1..20: mol_type = other RNA
aaccctcactatgtggagaa

SEQ ID NO: 2097 - RNA, 20 nt, synthetic construct
  source 1..20: mol_type = other RNA
aacctaggtgttgtagccta

SEQ ID NO: 2098 - RNA, 20 nt, synthetic construct
  source 1..20: mol_type = other RNA
aacctctaagaggcaaacac

SEQ ID NO: 2099 - RNA, 20 nt, synthetic construct
  source 1..20: mol_type = other RNA
aactaaagatgcagagaagt

SEQ ID NO: 2100 - RNA, 20 nt, synthetic construct
  source 1..20: mol_type = other RNA
aactacaaggagctccagaa

SEQ ID NO: 2101 - RNA, 20 nt, synthetic construct
  source 1..20: mol_type = other RNA
aactcctctcttctgtctga

SEQ ID NO: 2102 - RNA, 20 nt, synthetic construct
  source 1..20: mol_type = other RNA
aactctaatatagtcatgtg

SEQ ID NO: 2103 - RNA, 20 nt, synthetic construct
  source 1..20: mol_type = other RNA
aactgccagtatggtattgc

SEQ ID NO: 2104 - RNA, 20 nt, synthetic construct
  source 1..20: mol_type = other RNA
aacttggacttctctgcatc

SEQ ID NO: 2105 - RNA, 20 nt, synthetic construct
  source 1..20: mol_type = other RNA
aagaaagatcaaagccttgc

SEQ ID NO: 2106 - RNA, 20 nt, synthetic construct
  source 1..20: mol_type = other RNA
aagaagaatcctacagggtc

SEQ ID NO: 2107 - RNA, 20 nt, synthetic construct
  source 1..20: mol_type = other RNA
aagaaggtgtatggccccag

SEQ ID NO: 2108 - RNA, 20 nt, synthetic construct
  source 1..20: mol_type = other RNA
aagaatcctacagggtcatg

SEQ ID NO: 2109 - RNA, 20 nt, synthetic construct
  source 1..20: mol_type = other RNA
aagagagagggaggaacttg

SEQ ID NO: 2110 - RNA, 20 nt, synthetic construct
  source 1..20: mol_type = other RNA
aagagaggagttatacagct

SEQ ID NO: 2111 - RNA, 20 nt, synthetic construct
  source 1..20: mol_type = other RNA
aagaggcaaacacagtcccc

SEQ ID NO: 2112 - RNA, 20 nt, synthetic construct
  source 1..20: mol_type = other RNA
aagagtggttcattttctct

SEQ ID NO: 2113 - RNA, 20 nt, synthetic construct
  source 1..20: mol_type = other RNA
aagatcaaagccttgcaggt

SEQ ID NO: 2114 - RNA, 20 nt, synthetic construct
  source 1..20: mol_type = other RNA
aagatgcagagaagtccaag

SEQ ID NO: 2115 - RNA, 20 nt, synthetic construct
  source 1..20: mol_type = other RNA
aagcaagagagagggaggaa

SEQ ID NO: 2116 - RNA, 20 nt, synthetic construct
  source 1..20: mol_type = other RNA
aagcatttctcagaacatgt

SEQ ID NO: 2117 - RNA, 20 nt, synthetic construct
  source 1..20: mol_type = other RNA
aagccttgcaggtaatgtgg

SEQ ID NO: 2118 - RNA, 20 nt, synthetic construct
  source 1..20: mol_type = other RNA
aagcctttggactccaacta

SEQ ID NO: 2119 - RNA, 20 nt, synthetic construct
  source 1..20: mol_type = other RNA
aaggaaaagagtggttcatt

SEQ ID NO: 2120 - RNA, 20 nt, synthetic construct
  source 1..20: mol_type = other RNA
aaggaactgccagtatggta

SEQ ID NO: 2121 - RNA, 20 nt, synthetic construct
  source 1..20: mol_type = other RNA
aaggagctccagaagcaaga

SEQ ID NO: 2122 - RNA, 20 nt, synthetic construct
  source 1..20: mol_type = other RNA
aaggcaggtggttacccaca

SEQ ID NO: 2123 - RNA, 20 nt, synthetic construct
  source 1..20: mol_type = other RNA
aaggctttgatctttcttct

SEQ ID NO: 2124 - RNA, 20 nt, synthetic construct
  source 1..20: mol_type = other RNA
aaggcttttcaatgaaattc

SEQ ID NO: 2125 - RNA, 20 nt, synthetic construct
  source 1..20: mol_type = other RNA
aagggaaacagattgttata

SEQ ID NO: 2126 - RNA, 20 nt, synthetic construct
  source 1..20: mol_type = other RNA
aagggaacatgaccctgtag

SEQ ID NO: 2127 - RNA, 20 nt, synthetic construct
  source 1..20: mol_type = other RNA
aaggtggatgatctgcccag

SEQ ID NO: 2128 - RNA, 20 nt, synthetic construct
  source 1..20: mol_type = other RNA
aaggtgtatggccccaggta

SEQ ID NO: 2129 - RNA, 20 nt, synthetic construct
  source 1..20: mol_type = other RNA
aagtaacacatgactatatt

SEQ ID NO: 2130 - RNA, 20 nt, synthetic construct
  source 1..20: mol_type = other RNA
aagtccaagttcctccctct

SEQ ID NO: 2131 - RNA, 20 nt, synthetic construct
  source 1..20: mol_type = other RNA
aagttataacaatctgtttc

SEQ ID NO: 2132 - RNA, 20 nt, synthetic construct
  source 1..20: mol_type = other RNA
aagttcctccctctctcttg

SEQ ID NO: 2133 - RNA, 20 nt, synthetic construct
  source 1..20: mol_type = other RNA
aagtttttgaccttgagaaa

SEQ ID NO: 2134 - RNA, 20 nt, synthetic construct
  source 1..20: mol_type = other RNA
aataccatactggcagttcc

SEQ ID NO: 2135 - RNA, 20 nt, synthetic construct
  source 1..20: mol_type = other RNA
aatagatgtaactacaagga

SEQ ID NO: 2136 - RNA, 20 nt, synthetic construct
  source 1..20: mol_type = other RNA
aataggctataccatgtagc

SEQ ID NO: 2137 - RNA, 20 nt, synthetic construct
  source 1..20: mol_type = other RNA
aatagtcctcaggacagtga

SEQ ID NO: 2138 - RNA, 20 nt, synthetic construct
  source 1..20: mol_type = other RNA
aatataacaggagatttgaa

SEQ ID NO: 2139 - RNA, 20 nt, synthetic construct
  source 1..20: mol_type = other RNA
aatatagtcatgtgttactt

SEQ ID NO: 2140 - RNA, 20 nt, synthetic construct
  source 1..20: mol_type = other RNA
aatatggccatacctggggc

SEQ ID NO: 2141 - RNA, 20 nt, synthetic construct
  source 1..20: mol_type = other RNA
aatcaattccctgttctaga

SEQ ID NO: 2142 - RNA, 20 nt, synthetic construct
  source 1..20: mol_type = other RNA
aatcctacagggtcatgttc

SEQ ID NO: 2143 - RNA, 20 nt, synthetic construct
  source 1..20: mol_type = other RNA
aatctcctgttatattctag

SEQ ID NO: 2144 - RNA, 20 nt, synthetic construct
  source 1..20: mol_type = other RNA
aatctgtttccctttatctc

SEQ ID NO: 2145 - RNA, 20 nt, synthetic construct
  source 1..20: mol_type = other RNA
aatgaaattctactgcccag

SEQ ID NO: 2146 - RNA, 20 nt, synthetic construct
  source 1..20: mol_type = other RNA
aatgaaccactcttttcctt

SEQ ID NO: 2147 - RNA, 20 nt, synthetic construct
  source 1..20: mol_type = other RNA
aatgacggggacatgttctg

SEQ ID NO: 2148 - RNA, 20 nt, synthetic construct
  source 1..20: mol_type = other RNA
aatgcttacacaaacctagg

SEQ ID NO: 2149 - RNA, 20 nt, synthetic construct
  source 1..20: mol_type = other RNA
aatggcagaagaaagatcaa

SEQ ID NO: 2150 - RNA, 20 nt, synthetic construct
  source 1..20: mol_type = other RNA
aatgggatgtctgcagagct

SEQ ID NO: 2151 - RNA, 20 nt, synthetic construct
  source 1..20: mol_type = other RNA
aatggggtttcagcatcaat

SEQ ID NO: 2152 - RNA, 20 nt, synthetic construct
  source 1..20: mol_type = other RNA
aatgtaccctgggcagtaga

SEQ ID NO: 2153 - RNA, 20 nt, synthetic construct
  source 1..20: mol_type = other RNA
aatgtggaaatggcagaaga

SEQ ID NO: 2154 - RNA, 20 nt, synthetic construct
  source 1..20: mol_type = other RNA
aatgtgggtaaccacctgcc

SEQ ID NO: 2155 - RNA, 20 nt, synthetic construct
  source 1..20: mol_type = other RNA
aatgttactctgtcaatgtt

SEQ ID NO: 2156 - RNA, 20 nt, synthetic construct
  source 1..20: mol_type = other RNA
aatgttctccacatagtgag

SEQ ID NO: 2157 - RNA, 20 nt, synthetic construct
  source 1..20: mol_type = other RNA
aatgttgttttattcttcag

SEQ ID NO: 2158 - RNA, 20 nt, synthetic construct
  source 1..20: mol_type = other RNA
aatgtttttgtttcactgtc

SEQ ID NO: 2159 - RNA, 20 nt, synthetic construct
  source 1..20: mol_type = other RNA
aattccctgttctagaatat

SEQ ID NO: 2160 - RNA, 20 nt, synthetic construct
  source 1..20: mol_type = other RNA
aattctactgcccagggtac

SEQ ID NO: 2161 - RNA, 20 nt, synthetic construct
  source 1..20: mol_type = other RNA
aattgatttgggagagcatc

SEQ ID NO: 2162 - RNA, 20 nt, synthetic construct
  source 1..20: mol_type = other RNA
aattgtagagccaggacctg

SEQ ID NO: 2163 - RNA, 20 nt, synthetic construct
  source 1..20: mol_type = other RNA
aatttactaacagtgtgact

SEQ ID NO: 2164 - RNA, 20 nt, synthetic construct
  source 1..20: mol_type = other RNA
aatttcattgaaaagccttt

SEQ ID NO: 2165 - RNA, 20 nt, synthetic construct
  source 1..20: mol_type = other RNA
acaaaaacattttctcaagg

SEQ ID NO: 2166 - RNA, 20 nt, synthetic construct
  source 1..20: mol_type = other RNA
acaaacctaggtgttgtagc

SEQ ID NO: 2167 - RNA, 20 nt, synthetic construct
  source 1..20: mol_type = other RNA
acaaaggaaaagagtggttc

SEQ ID NO: 2168 - RNA, 20 nt, synthetic construct
  source 1..20: mol_type = other RNA
acaacacctaggtttgtgta

SEQ ID NO: 2169 - RNA, 20 nt, synthetic construct
  source 1..20: mol_type = other RNA
acaacattatacaaaggaaa

SEQ ID NO: 2170 - RNA, 20 nt, synthetic construct
  source 1..20: mol_type = other RNA
acaaggagctccagaagcaa

SEQ ID NO: 2171 - RNA, 20 nt, synthetic construct
  source 1..20: mol_type = other RNA
acaatctgtttccctttatc

SEQ ID NO: 2172 - RNA, 20 nt, synthetic construct
  source 1..20: mol_type = other RNA
acaatttactaacagtgtga

SEQ ID NO: 2173 - RNA, 20 nt, synthetic construct
  source 1..20: mol_type = other RNA
acacaaacctaggtgttgta

SEQ ID NO: 2174 - RNA, 20 nt, synthetic construct
  source 1..20: mol_type = other RNA
acacagtccccatacaggaa

SEQ ID NO: 2175 - RNA, 20 nt, synthetic construct
  source 1..20: mol_type = other RNA
acacatgactatattagagt

SEQ ID NO: 2176 - RNA, 20 nt, synthetic construct
  source 1..20: mol_type = other RNA
acacctaggtttgtgtaagc

SEQ ID NO: 2177 - RNA, 20 nt, synthetic construct
  source 1..20: mol_type = other RNA
acaccttcttcatgccactc

SEQ ID NO: 2178 - RNA, 20 nt, synthetic construct
  source 1..20: mol_type = other RNA
acacgcataggctacatggt

SEQ ID NO: 2179 - RNA, 20 nt, synthetic construct
  source 1..20: mol_type = other RNA
acactgttagtaaattgtag

SEQ ID NO: 2180 - RNA, 20 nt, synthetic construct
  source 1..20: mol_type = other RNA
acagaagagaggagttatac

SEQ ID NO: 2181 - RNA, 20 nt, synthetic construct
  source 1..20: mol_type = other RNA
acagagagggcaaaggaact

SEQ ID NO: 2182 - RNA, 20 nt, synthetic construct
  source 1..20: mol_type = other RNA
acagagtaacattttagcag

SEQ ID NO: 2183 - RNA, 20 nt, synthetic construct
  source 1..20: mol_type = other RNA
acagattgttataacttgat

SEQ ID NO: 2184 - RNA, 20 nt, synthetic construct
  source 1..20: mol_type = other RNA
acagcctgttactgtactga

SEQ ID NO: 2185 - RNA, 20 nt, synthetic construct
  source 1..20: mol_type = other RNA
acagctctaacatgataacc

SEQ ID NO: 2186 - RNA, 20 nt, synthetic construct
  source 1..20: mol_type = other RNA
acagctctgcagacatccca

SEQ ID NO: 2187 - RNA, 20 nt, synthetic construct
  source 1..20: mol_type = other RNA
acaggaatgggatgtctgca

SEQ ID NO: 2188 - RNA, 20 nt, synthetic construct
  source 1..20: mol_type = other RNA
acaggagaagggaacatgac

SEQ ID NO: 2189 - RNA, 20 nt, synthetic construct
  source 1..20: mol_type = other RNA
acaggagatttgaatggggt

SEQ ID NO: 2190 - RNA, 20 nt, synthetic construct
  source 1..20: mol_type = other RNA
acaggctgtacaggtttgta

SEQ ID NO: 2191 - RNA, 20 nt, synthetic construct
  source 1..20: mol_type = other RNA
acagggaattgatttgggag

SEQ ID NO: 2192 - RNA, 20 nt, synthetic construct
  source 1..20: mol_type = other RNA
acagggtcatgttcccttct

SEQ ID NO: 2193 - RNA, 20 nt, synthetic construct
  source 1..20: mol_type = other RNA
acagtaacaggctgtacagg

SEQ ID NO: 2194 - RNA, 20 nt, synthetic construct
  source 1..20: mol_type = other RNA
acagtccccatacaggaatg

SEQ ID NO: 2195 - RNA, 20 nt, synthetic construct
  source 1..20: mol_type = other RNA
acagtgaaacaaaaacattt

SEQ ID NO: 2196 - RNA, 20 nt, synthetic construct
  source 1..20: mol_type = other RNA
acagtgtgactgggcagatc

SEQ ID NO: 2197 - RNA, 20 nt, synthetic construct
  source 1..20: mol_type = other RNA
acatagtgagggttatcatg

SEQ ID NO: 2198 - RNA, 20 nt, synthetic construct
  source 1..20: mol_type = other RNA
acatcccattcctgtatggg

SEQ ID NO: 2199 - RNA, 20 nt, synthetic construct
  source 1..20: mol_type = other RNA
acatctctgctgaggagaga

SEQ ID NO: 2200 - RNA, 20 nt, synthetic construct
  source 1..20: mol_type = other RNA
acatgaccctgtaggattct

SEQ ID NO: 2201 - RNA, 20 nt, synthetic construct
  source 1..20: mol_type = other RNA
acatgactatattagagttc

SEQ ID NO: 2202 - RNA, 20 nt, synthetic construct
  source 1..20: mol_type = other RNA
acatgataaccctcactatg

SEQ ID NO: 2203 - RNA, 20 nt, synthetic construct
  source 1..20: mol_type = other RNA
acatggtatagcctattgct

SEQ ID NO: 2204 - RNA, 20 nt, synthetic construct
  source 1..20: mol_type = other RNA
acatgtccccgtcattaagt

SEQ ID NO: 2205 - RNA, 20 nt, synthetic construct
  source 1..20: mol_type = other RNA
acatgttctgagaaatgctt

SEQ ID NO: 2206 - RNA, 20 nt, synthetic construct
  source 1..20: mol_type = other RNA
acattacctgcaaggctttg

SEQ ID NO: 2207 - RNA, 20 nt, synthetic construct
  source 1..20: mol_type = other RNA
acattatacaaaggaaaaga

SEQ ID NO: 2208 - RNA, 20 nt, synthetic construct
  source 1..20: mol_type = other RNA
acattgacagagtaacattt

SEQ ID NO: 2209 - RNA, 20 nt, synthetic construct
  source 1..20: mol_type = other RNA
acattgatgctgaaacccca

SEQ ID NO: 2210 - RNA, 20 nt, synthetic construct
  source 1..20: mol_type = other RNA
acattggacatctctgctga

SEQ ID NO: 2211 - RNA, 20 nt, synthetic construct
  source 1..20: mol_type = other RNA
acattttagcagggaaagaa

SEQ ID NO: 2212 - RNA, 20 nt, synthetic construct
  source 1..20: mol_type = other RNA
accacctgcctttatcctgc

SEQ ID NO: 2213 - RNA, 20 nt, synthetic construct
  source 1..20: mol_type = other RNA
accactcttttcctttgtat

SEQ ID NO: 2214 - RNA, 20 nt, synthetic construct
  source 1..20: mol_type = other RNA
accatactggcagttccttt

SEQ ID NO: 2215 - RNA, 20 nt, synthetic construct
  source 1..20: mol_type = other RNA
accatgtagcctatgcgtgt

SEQ ID NO: 2216 - RNA, 20 nt, synthetic construct
  source 1..20: mol_type = other RNA
acccacattacctgcaaggc

SEQ ID NO: 2217 - RNA, 20 nt, synthetic construct
  source 1..20: mol_type = other RNA
accccattcaaatctcctgt

SEQ ID NO: 2218 - RNA, 20 nt, synthetic construct
  source 1..20: mol_type = other RNA
accctcactatgtggagaac

SEQ ID NO: 2219 - RNA, 20 nt, synthetic construct
  source 1..20: mol_type = other RNA
accctctacagagagggcaa

SEQ ID NO: 2220 - RNA, 20 nt, synthetic construct
  source 1..20: mol_type = other RNA
accctgggcagtagaatttc

SEQ ID NO: 2221 - RNA, 20 nt, synthetic construct
  source 1..20: mol_type = other RNA
accctgtaggattcttcttt

SEQ ID NO: 2222 - RNA, 20 nt, synthetic construct
  source 1..20: mol_type = other RNA
acctaggtgttgtagcctac

SEQ ID NO: 2223 - RNA, 20 nt, synthetic construct
  source 1..20: mol_type = other RNA
acctaggtttgtgtaagcat

SEQ ID NO: 2224 - RNA, 20 nt, synthetic construct
  source 1..20: mol_type = other RNA
acctctaagaggcaaacaca

SEQ ID NO: 2225 - RNA, 20 nt, synthetic construct
  source 1..20: mol_type = other RNA
acctgaactctaatatagtc

SEQ ID NO: 2226 - RNA, 20 nt, synthetic construct
  source 1..20: mol_type = other RNA
acctgcaaggctttgatctt

SEQ ID NO: 2227 - RNA, 20 nt, synthetic construct
  source 1..20: mol_type = other RNA
acctgcctttatcctgcaat

SEQ ID NO: 2228 - RNA, 20 nt, synthetic construct
  source 1..20: mol_type = other RNA
acctggggccatacaccttc

SEQ ID NO: 2229 - RNA, 20 nt, synthetic construct
  source 1..20: mol_type = other RNA
accttcctgatgctctccca

SEQ ID NO: 2230 - RNA, 20 nt, synthetic construct
  source 1..20: mol_type = other RNA
accttcttcatgccactcca

SEQ ID NO: 2231 - RNA, 20 nt, synthetic construct
  source 1..20: mol_type = other RNA
accttgagaaaatgtttttg

SEQ ID NO: 2232 - RNA, 20 nt, synthetic construct
  source 1..20: mol_type = other RNA
acgcataggctacatggtat

SEQ ID NO: 2233 - RNA, 20 nt, synthetic construct
  source 1..20: mol_type = other RNA
acggggacatgttctgagaa

SEQ ID NO: 2234 - RNA, 20 nt, synthetic construct
  source 1..20: mol_type = other RNA
actaaagatgcagagaagtc

SEQ ID NO: 2235 - RNA, 20 nt, synthetic construct
  source 1..20: mol_type = other RNA
actaacagtgtgactgggca

SEQ ID NO: 2236 - RNA, 20 nt, synthetic construct
  source 1..20: mol_type = other RNA
actacaaacctgtacagcct

SEQ ID NO: 2237 - RNA, 20 nt, synthetic construct
  source 1..20: mol_type = other RNA
actacaaggagctccagaag

SEQ ID NO: 2238 - RNA, 20 nt, synthetic construct
  source 1..20: mol_type = other RNA
actacacgcataggctacat

SEQ ID NO: 2239 - RNA, 20 nt, synthetic construct
  source 1..20: mol_type = other RNA
actagaggagataaagggaa

SEQ ID NO: 2240 - RNA, 20 nt, synthetic construct
  source 1..20: mol_type = other RNA
actataatagatgtaactac

SEQ ID NO: 2241 - RNA, 20 nt, synthetic construct
  source 1..20: mol_type = other RNA
actatattagagttcaggtc

SEQ ID NO: 2242 - RNA, 20 nt, synthetic construct
  source 1..20: mol_type = other RNA
actatgtggagaacattgac

SEQ ID NO: 2243 - RNA, 20 nt, synthetic construct
  source 1..20: mol_type = other RNA
actatttatagacagctcta

SEQ ID NO: 2244 - RNA, 20 nt, synthetic construct
  source 1..20: mol_type = other RNA
actccaactaaagatgcaga

SEQ ID NO: 2245 - RNA, 20 nt, synthetic construct
  source 1..20: mol_type = other RNA
actccacaggagaagggaac

SEQ ID NO: 2246 - RNA, 20 nt, synthetic construct
  source 1..20: mol_type = other RNA
actcctctcttctgtctgaa

SEQ ID NO: 2247 - RNA, 20 nt, synthetic construct
  source 1..20: mol_type = other RNA
actctaatatagtcatgtgt

SEQ ID NO: 2248 - RNA, 20 nt, synthetic construct
  source 1..20: mol_type = other RNA
actctgtcaatgttctccac

SEQ ID NO: 2249 - RNA, 20 nt, synthetic construct
  source 1..20: mol_type = other RNA
actcttttcctttgtataat

SEQ ID NO: 2250 - RNA, 20 nt, synthetic construct
  source 1..20: mol_type = other RNA
actgaccctctacagagagg

SEQ ID NO: 2251 - RNA, 20 nt, synthetic construct
  source 1..20: mol_type = other RNA
actgccagtatggtattgca

SEQ ID NO: 2252 - RNA, 20 nt, synthetic construct
  source 1..20: mol_type = other RNA
actgcccagggtacattgat

SEQ ID NO: 2253 - RNA, 20 nt, synthetic construct
  source 1..20: mol_type = other RNA
actggcagttcctttgccct

SEQ ID NO: 2254 - RNA, 20 nt, synthetic construct
  source 1..20: mol_type = other RNA
actgggcagatcatccacct

SEQ ID NO: 2255 - RNA, 20 nt, synthetic construct
  source 1..20: mol_type = other RNA
actgtcctgaggactattta

SEQ ID NO: 2256 - RNA, 20 nt, synthetic construct
  source 1..20: mol_type = other RNA
actgtgtttgcctcttagag

SEQ ID NO: 2257 - RNA, 20 nt, synthetic construct
  source 1..20: mol_type = other RNA
actgttagtaaattgtagag

SEQ ID NO: 2258 - RNA, 20 nt, synthetic construct
  source 1..20: mol_type = other RNA
acttaatgacggggacatgt

SEQ ID NO: 2259 - RNA, 20 nt, synthetic construct
  source 1..20: mol_type = other RNA
acttctctgcatctttagtt

SEQ ID NO: 2260 - RNA, 20 nt, synthetic construct
  source 1..20: mol_type = other RNA
acttggacttctctgcatct

SEQ ID NO: 2261 - RNA, 20 nt, synthetic construct
  source 1..20: mol_type = other RNA
agaaaatgaaccactctttt

SEQ ID NO: 2262 - RNA, 20 nt, synthetic construct
  source 1..20: mol_type = other RNA
agaaaatgtttttgtttcac

SEQ ID NO: 2263 - RNA, 20 nt, synthetic construct
  source 1..20: mol_type = other RNA
agaaagatcaaagccttgca

SEQ ID NO: 2264 - RNA, 20 nt, synthetic construct
  source 1..20: mol_type = other RNA
agaaatgcttacacaaacct

SEQ ID NO: 2265 - RNA, 20 nt, synthetic construct
  source 1..20: mol_type = other RNA
agaacagggaattgatttgg

SEQ ID NO: 2266 - RNA, 20 nt, synthetic construct
  source 1..20: mol_type = other RNA
agaacatgtccccgtcatta

SEQ ID NO: 2267 - RNA, 20 nt, synthetic construct
  source 1..20: mol_type = other RNA
agaacattgacagagtaaca

SEQ ID NO: 2268 - RNA, 20 nt, synthetic construct
  source 1..20: mol_type = other RNA
agaagaaagatcaaagcctt

SEQ ID NO: 2269 - RNA, 20 nt, synthetic construct
  source 1..20: mol_type = other RNA
agaagaatcctacagggtca

SEQ ID NO: 2270 - RNA, 20 nt, synthetic construct
  source 1..20: mol_type = other RNA
agaagagaggagttatacag

SEQ ID NO: 2271 - RNA, 20 nt, synthetic construct
  source 1..20: mol_type = other RNA
agaagcaagagagagggagg

SEQ ID NO: 2272 - RNA, 20 nt, synthetic construct
  source 1..20: mol_type = other RNA
agaagggaacatgaccctgt

SEQ ID NO: 2273 - RNA, 20 nt, synthetic construct
  source 1..20: mol_type = other RNA
agaaggtgtatggccccagg

SEQ ID NO: 2274 - RNA, 20 nt, synthetic construct
  source 1..20: mol_type = other RNA
agaagtccaagttcctccct

SEQ ID NO: 2275 - RNA, 20 nt, synthetic construct
  source 1..20: mol_type = other RNA
agaatataacaggagatttg

SEQ ID NO: 2276 - RNA, 20 nt, synthetic construct
  source 1..20: mol_type = other RNA
agaatcctacagggtcatgt

SEQ ID NO: 2277 - RNA, 20 nt, synthetic construct
  source 1..20: mol_type = other RNA
agaatttcattgaaaagcct

SEQ ID NO: 2278 - RNA, 20 nt, synthetic construct
  source 1..20: mol_type = other RNA
agacagaagagaggagttat

SEQ ID NO: 2279 - RNA, 20 nt, synthetic construct
  source 1..20: mol_type = other RNA
agacagctctaacatgataa

SEQ ID NO: 2280 - RNA, 20 nt, synthetic construct
  source 1..20: mol_type = other RNA
agacatcccattcctgtatg

SEQ ID NO: 2281 - RNA, 20 nt, synthetic construct
  source 1..20: mol_type = other RNA
agactacaaacctgtacagc

SEQ ID NO: 2282 - RNA, 20 nt, synthetic construct
  source 1..20: mol_type = other RNA
agagaaaatgaaccactctt

SEQ ID NO: 2283 - RNA, 20 nt, synthetic construct
  source 1..20: mol_type = other RNA
agagaagtccaagttcctcc

SEQ ID NO: 2284 - RNA, 20 nt, synthetic construct
  source 1..20: mol_type = other RNA
agagagagggaggaacttgg

SEQ ID NO: 2285 - RNA, 20 nt, synthetic construct
  source 1..20: mol_type = other RNA
agagaggagttatacagctc

SEQ ID NO: 2286 - RNA, 20 nt, synthetic construct
  source 1..20: mol_type = other RNA
agagagggaggaacttggac

SEQ ID NO: 2287 - RNA, 20 nt, synthetic construct
  source 1..20: mol_type = other RNA
agagagggcaaaggaactgc

SEQ ID NO: 2288 - RNA, 20 nt, synthetic construct
  source 1..20: mol_type = other RNA
agagatgtccaatgtggaaa

SEQ ID NO: 2289 - RNA, 20 nt, synthetic construct
  source 1..20: mol_type = other RNA
agagcatcaggaaggtggat

SEQ ID NO: 2290 - RNA, 20 nt, synthetic construct
  source 1..20: mol_type = other RNA
agagccaggacctgaactct

SEQ ID NO: 2291 - RNA, 20 nt, synthetic construct
  source 1..20: mol_type = other RNA
agagctgtataactcctctc

SEQ ID NO: 2292 - RNA, 20 nt, synthetic construct
  source 1..20: mol_type = other RNA
agagctgtctataaatagtc

SEQ ID NO: 2293 - RNA, 20 nt, synthetic construct
  source 1..20: mol_type = other RNA
agaggagataaagggaaaca

SEQ ID NO: 2294 - RNA, 20 nt, synthetic construct
  source 1..20: mol_type = other RNA
agaggagttatacagctctg

SEQ ID NO: 2295 - RNA, 20 nt, synthetic construct
  source 1..20: mol_type = other RNA
agaggcaaacacagtcccca

SEQ ID NO: 2296 - RNA, 20 nt, synthetic construct
  source 1..20: mol_type = other RNA
agagggaggaacttggactt

SEQ ID NO: 2297 - RNA, 20 nt, synthetic construct
  source 1..20: mol_type = other RNA
agagggcaaaggaactgcca

SEQ ID NO: 2298 - RNA, 20 nt, synthetic construct
  source 1..20: mol_type = other RNA
agagggtcagtaatatggcc

SEQ ID NO: 2299 - RNA, 20 nt, synthetic construct
  source 1..20: mol_type = other RNA
agaggttcccaggccactag

SEQ ID NO: 2300 - RNA, 20 nt, synthetic construct
  source 1..20: mol_type = other RNA
agagtaacattttagcaggg

SEQ ID NO: 2301 - RNA, 20 nt, synthetic construct
  source 1..20: mol_type = other RNA
agagtggttcattttctctc

SEQ ID NO: 2302 - RNA, 20 nt, synthetic construct
  source 1..20: mol_type = other RNA
agagttcaggtcctggctct

SEQ ID NO: 2303 - RNA, 20 nt, synthetic construct
  source 1..20: mol_type = other RNA
agataaagggaaacagattg

SEQ ID NO: 2304 - RNA, 20 nt, synthetic construct
  source 1..20: mol_type = other RNA
agatcaaagccttgcaggta

SEQ ID NO: 2305 - RNA, 20 nt, synthetic construct
  source 1..20: mol_type = other RNA
agatcatccaccttcctgat

SEQ ID NO: 2306 - RNA, 20 nt, synthetic construct
  source 1..20: mol_type = other RNA
agatgcagagaagtccaagt

SEQ ID NO: 2307 - RNA, 20 nt, synthetic construct
  source 1..20: mol_type = other RNA
agatgtaactacaaggagct

SEQ ID NO: 2308 - RNA, 20 nt, synthetic construct
  source 1..20: mol_type = other RNA
agatgtccaatgtggaaatg

SEQ ID NO: 2309 - RNA, 20 nt, synthetic construct
  source 1..20: mol_type = other RNA
agatttgaatggggtttcag

SEQ ID NO: 2310 - RNA, 20 nt, synthetic construct
  source 1..20: mol_type = other RNA
agcaagagagagggaggaac

SEQ ID NO: 2311 - RNA, 20 nt, synthetic construct
  source 1..20: mol_type = other RNA
agcagagatgtccaatgtgg

SEQ ID NO: 2312 - RNA, 20 nt, synthetic construct
  source 1..20: mol_type = other RNA
agcagggaaagaagaatcct

SEQ ID NO: 2313 - RNA, 20 nt, synthetic construct
  source 1..20: mol_type = other RNA
agcatcaatgtaccctgggc

SEQ ID NO: 2314 - RNA, 20 nt, synthetic construct
  source 1..20: mol_type = other RNA
agcatcaggaaggtggatga

SEQ ID NO: 2315 - RNA, 20 nt, synthetic construct
  source 1..20: mol_type = other RNA
agcatttctcagaacatgtc

SEQ ID NO: 2316 - RNA, 20 nt, synthetic construct
  source 1..20: mol_type = other RNA
agccaggacctgaactctaa

SEQ ID NO: 2317 - RNA, 20 nt, synthetic construct
  source 1..20: mol_type = other RNA
agcctactacacgcataggc

SEQ ID NO: 2318 - RNA, 20 nt, synthetic construct
  source 1..20: mol_type = other RNA
agcctatgcgtgtagtaggc

SEQ ID NO: 2319 - RNA, 20 nt, synthetic construct
  source 1..20: mol_type = other RNA
agcctgttactgtactgaat

SEQ ID NO: 2320 - RNA, 20 nt, synthetic construct
  source 1..20: mol_type = other RNA
agccttgcaggtaatgtggg

SEQ ID NO: 2321 - RNA, 20 nt, synthetic construct
  source 1..20: mol_type = other RNA
agcctttggactccaactaa

SEQ ID NO: 2322 - RNA, 20 nt, synthetic construct
  source 1..20: mol_type = other RNA
agctccagaagcaagagaga

SEQ ID NO: 2323 - RNA, 20 nt, synthetic construct
  source 1..20: mol_type = other RNA
agctccttgtagttacatct

SEQ ID NO: 2324 - RNA, 20 nt, synthetic construct
  source 1..20: mol_type = other RNA
agctctaacatgataaccct

SEQ ID NO: 2325 - RNA, 20 nt, synthetic construct
  source 1..20: mol_type = other RNA
agctctgcagacatcccatt

SEQ ID NO: 2326 - RNA, 20 nt, synthetic construct
  source 1..20: mol_type = other RNA
agctgtataactcctctctt

SEQ ID NO: 2327 - RNA, 20 nt, synthetic construct
  source 1..20: mol_type = other RNA
agctgtctataaatagtcct

SEQ ID NO: 2328 - RNA, 20 nt, synthetic construct
  source 1..20: mol_type = other RNA
aggaaaagagtggttcattt

SEQ ID NO: 2329 - RNA, 20 nt, synthetic construct
  source 1..20: mol_type = other RNA
aggaactgccagtatggtat

SEQ ID NO: 2330 - RNA, 20 nt, synthetic construct
  source 1..20: mol_type = other RNA
aggaacttggacttctctgc

SEQ ID NO: 2331 - RNA, 20 nt, synthetic construct
  source 1..20: mol_type = other RNA
aggaaggtggatgatctgcc

SEQ ID NO: 2332 - RNA, 20 nt, synthetic construct
  source 1..20: mol_type = other RNA
aggaatgggatgtctgcaga

SEQ ID NO: 2333 - RNA, 20 nt, synthetic construct
  source 1..20: mol_type = other RNA
aggacagtgaaacaaaaaca

SEQ ID NO: 2334 - RNA, 20 nt, synthetic construct
  source 1..20: mol_type = other RNA
aggacctgaactctaatata

SEQ ID NO: 2335 - RNA, 20 nt, synthetic construct
  source 1..20: mol_type = other RNA
aggactatttatagacagct

SEQ ID NO: 2336 - RNA, 20 nt, synthetic construct
  source 1..20: mol_type = other RNA
aggagaagggaacatgaccc

SEQ ID NO: 2337 - RNA, 20 nt, synthetic construct
  source 1..20: mol_type = other RNA
aggagagaaaatgaaccact

SEQ ID NO: 2338 - RNA, 20 nt, synthetic construct
  source 1..20: mol_type = other RNA
aggagataaagggaaacaga

SEQ ID NO: 2339 - RNA, 20 nt, synthetic construct
  source 1..20: mol_type = other RNA
aggagatttgaatggggttt

SEQ ID NO: 2340 - RNA, 20 nt, synthetic construct
  source 1..20: mol_type = other RNA
aggagctccagaagcaagag

SEQ ID NO: 2341 - RNA, 20 nt, synthetic construct
  source 1..20: mol_type = other RNA
aggagttatacagctctgca

SEQ ID NO: 2342 - RNA, 20 nt, synthetic construct
  source 1..20: mol_type = other RNA
aggataaaggcaggtggtta

SEQ ID NO: 2343 - RNA, 20 nt, synthetic construct
  source 1..20: mol_type = other RNA
aggattcttctttccctgct

SEQ ID NO: 2344 - RNA, 20 nt, synthetic construct
  source 1..20: mol_type = other RNA
aggcaaacacagtccccata

SEQ ID NO: 2345 - RNA, 20 nt, synthetic construct
  source 1..20: mol_type = other RNA
aggcaggtggttacccacat

SEQ ID NO: 2346 - RNA, 20 nt, synthetic construct
  source 1..20: mol_type = other RNA
aggccactagaggagataaa

SEQ ID NO: 2347 - RNA, 20 nt, synthetic construct
  source 1..20: mol_type = other RNA
aggctacaacacctaggttt

SEQ ID NO: 2348 - RNA, 20 nt, synthetic construct
  source 1..20: mol_type = other RNA
aggctataccatgtagccta

SEQ ID NO: 2349 - RNA, 20 nt, synthetic construct
  source 1..20: mol_type = other RNA
aggctgtacaggtttgtagt

SEQ ID NO: 2350 - RNA, 20 nt, synthetic construct
  source 1..20: mol_type = other RNA
aggctttgatctttcttctg

SEQ ID NO: 2351 - RNA, 20 nt, synthetic construct
  source 1..20: mol_type = other RNA
aggcttttcaatgaaattct

SEQ ID NO: 2352 - RNA, 20 nt, synthetic construct
  source 1..20: mol_type = other RNA
agggaaacagattgttataa

SEQ ID NO: 2353 - RNA, 20 nt, synthetic construct
  source 1..20: mol_type = other RNA
agggaaagaagaatcctaca

SEQ ID NO: 2354 - RNA, 20 nt, synthetic construct
  source 1..20: mol_type = other RNA
agggaacatgaccctgtagg

SEQ ID NO: 2355 - RNA, 20 nt, synthetic construct
  source 1..20: mol_type = other RNA
agggaattgatttgggagag

SEQ ID NO: 2356 - RNA, 20 nt, synthetic construct
  source 1..20: mol_type = other RNA
agggaggaacttggacttct

SEQ ID NO: 2357 - RNA, 20 nt, synthetic construct
  source 1..20: mol_type = other RNA
agggcaaaggaactgccagt

SEQ ID NO: 2358 - RNA, 20 nt, synthetic construct
  source 1..20: mol_type = other RNA
agggtacattgatgctgaaa

SEQ ID NO: 2359 - RNA, 20 nt, synthetic construct
  source 1..20: mol_type = other RNA
agggtcagtaatatggccat

SEQ ID NO: 2360 - RNA, 20 nt, synthetic construct
  source 1..20: mol_type = other RNA
agggtcatgttcccttctcc

SEQ ID NO: 2361 - RNA, 20 nt, synthetic construct
  source 1..20: mol_type = other RNA
agggttatcatgttagagct

SEQ ID NO: 2362 - RNA, 20 nt, synthetic construct
  source 1..20: mol_type = other RNA
aggtaatgtgggtaaccacc

SEQ ID NO: 2363 - RNA, 20 nt, synthetic construct
  source 1..20: mol_type = other RNA
aggtatggccatattactga

SEQ ID NO: 2364 - RNA, 20 nt, synthetic construct
  source 1..20: mol_type = other RNA
aggtcctggctctacaattt

SEQ ID NO: 2365 - RNA, 20 nt, synthetic construct
  source 1..20: mol_type = other RNA
aggtggatgatctgcccagt

SEQ ID NO: 2366 - RNA, 20 nt, synthetic construct
  source 1..20: mol_type = other RNA
aggtggttacccacattacc

SEQ ID NO: 2367 - RNA, 20 nt, synthetic construct
  source 1..20: mol_type = other RNA
aggtgtatggccccaggtat

SEQ ID NO: 2368 - RNA, 20 nt, synthetic construct
  source 1..20: mol_type = other RNA
aggtgttgtagcctactaca

SEQ ID NO: 2369 - RNA, 20 nt, synthetic construct
  source 1..20: mol_type = other RNA
aggttcccaggccactagag

SEQ ID NO: 2370 - RNA, 20 nt, synthetic construct
  source 1..20: mol_type = other RNA
aggtttgtgtaagcatttct

SEQ ID NO: 2371 - RNA, 20 nt, synthetic construct
  source 1..20: mol_type = other RNA
agtaaattgtagagccagga

SEQ ID NO: 2372 - RNA, 20 nt, synthetic construct
  source 1..20: mol_type = other RNA
agtaacacatgactatatta

SEQ ID NO: 2373 - RNA, 20 nt, synthetic construct
  source 1..20: mol_type = other RNA
agtaacaggctgtacaggtt

SEQ ID NO: 2374 - RNA, 20 nt, synthetic construct
  source 1..20: mol_type = other RNA
agtaacattttagcagggaa

SEQ ID NO: 2375 - RNA, 20 nt, synthetic construct
  source 1..20: mol_type = other RNA
agtaatatggccatacctgg

SEQ ID NO: 2376 - RNA, 20 nt, synthetic construct
  source 1..20: mol_type = other RNA
agtagaatttcattgaaaag

SEQ ID NO: 2377 - RNA, 20 nt, synthetic construct
  source 1..20: mol_type = other RNA
agtaggctacaacacctagg

SEQ ID NO: 2378 - RNA, 20 nt, synthetic construct
  source 1..20: mol_type = other RNA
agtatggtattgcaggataa

SEQ ID NO: 2379 - RNA, 20 nt, synthetic construct
  source 1..20: mol_type = other RNA
agtcacactgttagtaaatt

SEQ ID NO: 2380 - RNA, 20 nt, synthetic construct
  source 1..20: mol_type = other RNA
agtcatgtgttacttaatga

SEQ ID NO: 2381 - RNA, 20 nt, synthetic construct
  source 1..20: mol_type = other RNA
agtccaaaggcttttcaatg

SEQ ID NO: 2382 - RNA, 20 nt, synthetic construct
  source 1..20: mol_type = other RNA
agtccaagttcctccctctc

SEQ ID NO: 2383 - RNA, 20 nt, synthetic construct
  source 1..20: mol_type = other RNA
agtccccatacaggaatggg

SEQ ID NO: 2384 - RNA, 20 nt, synthetic construct
  source 1..20: mol_type = other RNA
agtcctcaggacagtgaaac

SEQ ID NO: 2385 - RNA, 20 nt, synthetic construct
  source 1..20: mol_type = other RNA
agtctaggagcaataggcta

SEQ ID NO: 2386 - RNA, 20 nt, synthetic construct
  source 1..20: mol_type = other RNA
agtgaaacaaaaacattttc

SEQ ID NO: 2387 - RNA, 20 nt, synthetic construct
  source 1..20: mol_type = other RNA
agtgagggttatcatgttag

SEQ ID NO: 2388 - RNA, 20 nt, synthetic construct
  source 1..20: mol_type = other RNA
agtggcatgaagaaggtgta

SEQ ID NO: 2389 - RNA, 20 nt, synthetic construct
  source 1..20: mol_type = other RNA
agtggcctgggaacctctaa

SEQ ID NO: 2390 - RNA, 20 nt, synthetic construct
  source 1..20: mol_type = other RNA
agtggttcattttctctcct

SEQ ID NO: 2391 - RNA, 20 nt, synthetic construct
  source 1..20: mol_type = other RNA
agtgtgactgggcagatcat

SEQ ID NO: 2392 - RNA, 20 nt, synthetic construct
  source 1..20: mol_type = other RNA
agttataacaatctgtttcc

SEQ ID NO: 2393 - RNA, 20 nt, synthetic construct
  source 1..20: mol_type = other RNA
agttatacagctctgcagac

SEQ ID NO: 2394 - RNA, 20 nt, synthetic construct
  source 1..20: mol_type = other RNA
agttcaggtcctggctctac

SEQ ID NO: 2395 - RNA, 20 nt, synthetic construct
  source 1..20: mol_type = other RNA
agttcctccctctctcttgc

SEQ ID NO: 2396 - RNA, 20 nt, synthetic construct
  source 1..20: mol_type = other RNA
agttcctttgccctctctgt

SEQ ID NO: 2397 - RNA, 20 nt, synthetic construct
  source 1..20: mol_type = other RNA
agttggagtccaaaggcttt

SEQ ID NO: 2398 - RNA, 20 nt, synthetic construct
  source 1..20: mol_type = other RNA
agtttttgaccttgagaaaa

SEQ ID NO: 2399 - RNA, 20 nt, synthetic construct
  source 1..20: mol_type = other RNA
ataaaggcaggtggttaccc

SEQ ID NO: 2400 - RNA, 20 nt, synthetic construct
  source 1..20: mol_type = other RNA
ataaagggaaacagattgtt

SEQ ID NO: 2401 - RNA, 20 nt, synthetic construct
  source 1..20: mol_type = other RNA
ataaatagtcctcaggacag

SEQ ID NO: 2402 - RNA, 20 nt, synthetic construct
  source 1..20: mol_type = other RNA
ataacaatctgtttcccttt

SEQ ID NO: 2403 - RNA, 20 nt, synthetic construct
  source 1..20: mol_type = other RNA
ataacaggagatttgaatgg

SEQ ID NO: 2404 - RNA, 20 nt, synthetic construct
  source 1..20: mol_type = other RNA
ataaccctcactatgtggag

SEQ ID NO: 2405 - RNA, 20 nt, synthetic construct
  source 1..20: mol_type = other RNA
ataactcctctcttctgtct

SEQ ID NO: 2406 - RNA, 20 nt, synthetic construct
  source 1..20: mol_type = other RNA
ataatagatgtaactacaag

SEQ ID NO: 2407 - RNA, 20 nt, synthetic construct
  source 1..20: mol_type = other RNA
atacaaaggaaaagagtggt

SEQ ID NO: 2408 - RNA, 20 nt, synthetic construct
  source 1..20: mol_type = other RNA
atacaccttcttcatgccac

SEQ ID NO: 2409 - RNA, 20 nt, synthetic construct
  source 1..20: mol_type = other RNA
atacagctctgcagacatcc

SEQ ID NO: 2410 - RNA, 20 nt, synthetic construct
  source 1..20: mol_type = other RNA
atacaggaatgggatgtctg

SEQ ID NO: 2411 - RNA, 20 nt, synthetic construct
  source 1..20: mol_type = other RNA
ataccatactggcagttcct

SEQ ID NO: 2412 - RNA, 20 nt, synthetic construct
  source 1..20: mol_type = other RNA
ataccatgtagcctatgcgt

SEQ ID NO: 2413 - RNA, 20 nt, synthetic construct
  source 1..20: mol_type = other RNA
atacctggggccatacacct

SEQ ID NO: 2414 - RNA, 20 nt, synthetic construct
  source 1..20: mol_type = other RNA
atactggcagttcctttgcc

SEQ ID NO: 2415 - RNA, 20 nt, synthetic construct
  source 1..20: mol_type = other RNA
atagacagctctaacatgat

SEQ ID NO: 2416 - RNA, 20 nt, synthetic construct
  source 1..20: mol_type = other RNA
atagatgtaactacaaggag

SEQ ID NO: 2417 - RNA, 20 nt, synthetic construct
  source 1..20: mol_type = other RNA
ataggctataccatgtagcc

SEQ ID NO: 2418 - RNA, 20 nt, synthetic construct
  source 1..20: mol_type = other RNA
atagtcatgtgttacttaat

SEQ ID NO: 2419 - RNA, 20 nt, synthetic construct
  source 1..20: mol_type = other RNA
atagtcctcaggacagtgaa

SEQ ID NO: 2420 - RNA, 20 nt, synthetic construct
  source 1..20: mol_type = other RNA
atagtgagggttatcatgtt

SEQ ID NO: 2421 - RNA, 20 nt, synthetic construct
  source 1..20: mol_type = other RNA
atataacaggagatttgaat

SEQ ID NO: 2422 - RNA, 20 nt, synthetic construct
  source 1..20: mol_type = other RNA
atatagtcatgtgttactta

SEQ ID NO: 2423 - RNA, 20 nt, synthetic construct
  source 1..20: mol_type = other RNA
atatggccatacctggggcc

SEQ ID NO: 2424 - RNA, 20 nt, synthetic construct
  source 1..20: mol_type = other RNA
atattactgaccctctacag

SEQ ID NO: 2425 - RNA, 20 nt, synthetic construct
  source 1..20: mol_type = other RNA
atattagagttcaggtcctg

SEQ ID NO: 2426 - RNA, 20 nt, synthetic construct
  source 1..20: mol_type = other RNA
atattctagaacagggaatt

SEQ ID NO: 2427 - RNA, 20 nt, synthetic construct
  source 1..20: mol_type = other RNA
atcaaagccttgcaggtaat

SEQ ID NO: 2428 - RNA, 20 nt, synthetic construct
  source 1..20: mol_type = other RNA
atcaagttataacaatctgt

SEQ ID NO: 2429 - RNA, 20 nt, synthetic construct
  source 1..20: mol_type = other RNA
atcaatgtaccctgggcagt

SEQ ID NO: 2430 - RNA, 20 nt, synthetic construct
  source 1..20: mol_type = other RNA
atcaattccctgttctagaa

SEQ ID NO: 2431 - RNA, 20 nt, synthetic construct
  source 1..20: mol_type = other RNA
atcaggaaggtggatgatct

SEQ ID NO: 2432 - RNA, 20 nt, synthetic construct
  source 1..20: mol_type = other RNA
atcatccaccttcctgatgc

SEQ ID NO: 2433 - RNA, 20 nt, synthetic construct
  source 1..20: mol_type = other RNA
atcatgttagagctgtctat

SEQ ID NO: 2434 - RNA, 20 nt, synthetic construct
  source 1..20: mol_type = other RNA
atccaccttcctgatgctct

SEQ ID NO: 2435 - RNA, 20 nt, synthetic construct
  source 1..20: mol_type = other RNA
atcccattcctgtatgggga

SEQ ID NO: 2436 - RNA, 20 nt, synthetic construct
  source 1..20: mol_type = other RNA
atcctacagggtcatgttcc

SEQ ID NO: 2437 - RNA, 20 nt, synthetic construct
  source 1..20: mol_type = other RNA
atcctgcaataccatactgg

SEQ ID NO: 2438 - RNA, 20 nt, synthetic construct
  source 1..20: mol_type = other RNA
atctcctctagtggcctggg

SEQ ID NO: 2439 - RNA, 20 nt, synthetic construct
  source 1..20: mol_type = other RNA
atctcctgttatattctaga

SEQ ID NO: 2440 - RNA, 20 nt, synthetic construct
  source 1..20: mol_type = other RNA
atctctgctgaggagagaaa

SEQ ID NO: 2441 - RNA, 20 nt, synthetic construct
  source 1..20: mol_type = other RNA
atctgcccagtcacactgtt

SEQ ID NO: 2442 - RNA, 20 nt, synthetic construct
  source 1..20: mol_type = other RNA
atctgtttccctttatctcc

SEQ ID NO: 2443 - RNA, 20 nt, synthetic construct
  source 1..20: mol_type = other RNA
atctttagttggagtccaaa

SEQ ID NO: 2444 - RNA, 20 nt, synthetic construct
  source 1..20: mol_type = other RNA
atctttcttctgccatttcc

SEQ ID NO: 2445 - RNA, 20 nt, synthetic construct
  source 1..20: mol_type = other RNA
atgaaattctactgcccagg

SEQ ID NO: 2446 - RNA, 20 nt, synthetic construct
  source 1..20: mol_type = other RNA
atgaaccactcttttccttt

SEQ ID NO: 2447 - RNA, 20 nt, synthetic construct
  source 1..20: mol_type = other RNA
atgaagaaggtgtatggccc

SEQ ID NO: 2448 - RNA, 20 nt, synthetic construct
  source 1..20: mol_type = other RNA
atgaccctgtaggattcttc

SEQ ID NO: 2449 - RNA, 20 nt, synthetic construct
  source 1..20: mol_type = other RNA
atgacggggacatgttctga

SEQ ID NO: 2450 - RNA, 20 nt, synthetic construct
  source 1..20: mol_type = other RNA
atgactatattagagttcag

SEQ ID NO: 2451 - RNA, 20 nt, synthetic construct
  source 1..20: mol_type = other RNA
atgataaccctcactatgtg

SEQ ID NO: 2452 - RNA, 20 nt, synthetic construct
  source 1..20: mol_type = other RNA
atgatctgcccagtcacact

SEQ ID NO: 2453 - RNA, 20 nt, synthetic construct
  source 1..20: mol_type = other RNA
atgcagagaagtccaagttc

SEQ ID NO: 2454 - RNA, 20 nt, synthetic construct
  source 1..20: mol_type = other RNA
atgccactccacaggagaag

SEQ ID NO: 2455 - RNA, 20 nt, synthetic construct
  source 1..20: mol_type = other RNA
atgcgtgtagtaggctacaa

SEQ ID NO: 2456 - RNA, 20 nt, synthetic construct
  source 1..20: mol_type = other RNA
atgctctcccaaatcaattc

SEQ ID NO: 2457 - RNA, 20 nt, synthetic construct
  source 1..20: mol_type = other RNA
atgctgaaaccccattcaaa

SEQ ID NO: 2458 - RNA, 20 nt, synthetic construct
  source 1..20: mol_type = other RNA
atgcttacacaaacctaggt

SEQ ID NO: 2459 - RNA, 20 nt, synthetic construct
  source 1..20: mol_type = other RNA
atggcagaagaaagatcaaa

SEQ ID NO: 2460 - RNA, 20 nt, synthetic construct
  source 1..20: mol_type = other RNA
atggccatacctggggccat

SEQ ID NO: 2461 - RNA, 20 nt, synthetic construct
  source 1..20: mol_type = other RNA
atggccatattactgaccct

SEQ ID NO: 2462 - RNA, 20 nt, synthetic construct
  source 1..20: mol_type = other RNA
atggccccaggtatggccat

SEQ ID NO: 2463 - RNA, 20 nt, synthetic construct
  source 1..20: mol_type = other RNA
atgggatgtctgcagagctg

SEQ ID NO: 2464 - RNA, 20 nt, synthetic construct
  source 1..20: mol_type = other RNA
atggggactgtgtttgcctc

SEQ ID NO: 2465 - RNA, 20 nt, synthetic construct
  source 1..20: mol_type = other RNA
atggggtttcagcatcaatg

SEQ ID NO: 2466 - RNA, 20 nt, synthetic construct
  source 1..20: mol_type = other RNA
atggtattgcaggataaagg

SEQ ID NO: 2467 - RNA, 20 nt, synthetic construct
  source 1..20: mol_type = other RNA
atgtaactacaaggagctcc

SEQ ID NO: 2468 - RNA, 20 nt, synthetic construct
  source 1..20: mol_type = other RNA
atgtaccctgggcagtagaa

SEQ ID NO: 2469 - RNA, 20 nt, synthetic construct
  source 1..20: mol_type = other RNA
atgtagcctatgcgtgtagt

SEQ ID NO: 2470 - RNA, 20 nt, synthetic construct
  source 1..20: mol_type = other RNA
atgtccaatgtggaaatggc

SEQ ID NO: 2471 - RNA, 20 nt, synthetic construct
  source 1..20: mol_type = other RNA
atgtccccgtcattaagtaa

SEQ ID NO: 2472 - RNA, 20 nt, synthetic construct
  source 1..20: mol_type = other RNA
atgtctgcagagctgtataa

SEQ ID NO: 2473 - RNA, 20 nt, synthetic construct
  source 1..20: mol_type = other RNA
atgtggaaatggcagaagaa

SEQ ID NO: 2474 - RNA, 20 nt, synthetic construct
  source 1..20: mol_type = other RNA
atgtggagaacattgacaga

SEQ ID NO: 2475 - RNA, 20 nt, synthetic construct
  source 1..20: mol_type = other RNA
atgtgggtaaccacctgcct

SEQ ID NO: 2476 - RNA, 20 nt, synthetic construct
  source 1..20: mol_type = other RNA
atgtgttacttaatgacggg

SEQ ID NO: 2477 - RNA, 20 nt, synthetic construct
  source 1..20: mol_type = other RNA
atgttactctgtcaatgttc

SEQ ID NO: 2478 - RNA, 20 nt, synthetic construct
  source 1..20: mol_type = other RNA
atgttagagctgtctataaa

SEQ ID NO: 2479 - RNA, 20 nt, synthetic construct
  source 1..20: mol_type = other RNA
atgttcccttctcctgtgga

SEQ ID NO: 2480 - RNA, 20 nt, synthetic construct
  source 1..20: mol_type = other RNA
atgttctccacatagtgagg

SEQ ID NO: 2481 - RNA, 20 nt, synthetic construct
  source 1..20: mol_type = other RNA
atgttctgagaaatgcttac

SEQ ID NO: 2482 - RNA, 20 nt, synthetic construct
  source 1..20: mol_type = other RNA
atgttgttttattcttcaga

SEQ ID NO: 2483 - RNA, 20 nt, synthetic construct
  source 1..20: mol_type = other RNA
atgtttttgtttcactgtcc

SEQ ID NO: 2484 - RNA, 20 nt, synthetic construct
  source 1..20: mol_type = other RNA
attaagtaacacatgactat

SEQ ID NO: 2485 - RNA, 20 nt, synthetic construct
  source 1..20: mol_type = other RNA
attacctgcaaggctttgat

SEQ ID NO: 2486 - RNA, 20 nt, synthetic construct
  source 1..20: mol_type = other RNA
attactgaccctctacagag

SEQ ID NO: 2487 - RNA, 20 nt, synthetic construct
  source 1..20: mol_type = other RNA
attagagttcaggtcctggc

SEQ ID NO: 2488 - RNA, 20 nt, synthetic construct
  source 1..20: mol_type = other RNA
attatacaaaggaaaagagt

SEQ ID NO: 2489 - RNA, 20 nt, synthetic construct
  source 1..20: mol_type = other RNA
attcaaatctcctgttatat

SEQ ID NO: 2490 - RNA, 20 nt, synthetic construct
  source 1..20: mol_type = other RNA
attccctgttctagaatata

SEQ ID NO: 2491 - RNA, 20 nt, synthetic construct
  source 1..20: mol_type = other RNA
attcctgtatggggactgtg

SEQ ID NO: 2492 - RNA, 20 nt, synthetic construct
  source 1..20: mol_type = other RNA
attctactgcccagggtaca

SEQ ID NO: 2493 - RNA, 20 nt, synthetic construct
  source 1..20: mol_type = other RNA
attctagaacagggaattga

SEQ ID NO: 2494 - RNA, 20 nt, synthetic construct
  source 1..20: mol_type = other RNA
attcttcagacagaagagag

SEQ ID NO: 2495 - RNA, 20 nt, synthetic construct
  source 1..20: mol_type = other RNA
attcttctttccctgctaaa

SEQ ID NO: 2496 - RNA, 20 nt, synthetic construct
  source 1..20: mol_type = other RNA
attgaaaagcctttggactc

SEQ ID NO: 2497 - RNA, 20 nt, synthetic construct
  source 1..20: mol_type = other RNA
attgacagagtaacatttta

SEQ ID NO: 2498 - RNA, 20 nt, synthetic construct
  source 1..20: mol_type = other RNA
attgatgctgaaaccccatt

SEQ ID NO: 2499 - RNA, 20 nt, synthetic construct
  source 1..20: mol_type = other RNA
attgatttgggagagcatca

SEQ ID NO: 2500 - RNA, 20 nt, synthetic construct
  source 1..20: mol_type = other RNA
attgcaggataaaggcaggt

SEQ ID NO: 2501 - RNA, 20 nt, synthetic construct
  source 1..20: mol_type = other RNA
attggacatctctgctgagg

SEQ ID NO: 2502 - RNA, 20 nt, synthetic construct
  source 1..20: mol_type = other RNA
attgtagagccaggacctga

SEQ ID NO: 2503 - RNA, 20 nt, synthetic construct
  source 1..20: mol_type = other RNA
atttactaacagtgtgactg

SEQ ID NO: 2504 - RNA, 20 nt, synthetic construct
  source 1..20: mol_type = other RNA
atttatagacagctctaaca

SEQ ID NO: 2505 - RNA, 20 nt, synthetic construct
  source 1..20: mol_type = other RNA
atttcattgaaaagcctttg

SEQ ID NO: 2506 - RNA, 20 nt, synthetic construct
  source 1..20: mol_type = other RNA
atttccacattggacatctc

SEQ ID NO: 2507 - RNA, 20 nt, synthetic construct
  source 1..20: mol_type = other RNA
atttctcagaacatgtcccc

SEQ ID NO: 2508 - RNA, 20 nt, synthetic construct
  source 1..20: mol_type = other RNA
atttgaatggggtttcagca

SEQ ID NO: 2509 - RNA, 20 nt, synthetic construct
  source 1..20: mol_type = other RNA
atttgggagagcatcaggaa

SEQ ID NO: 2510 - RNA, 20 nt, synthetic construct
  source 1..20: mol_type = other RNA
attttagcagggaaagaaga

SEQ ID NO: 2511 - RNA, 20 nt, synthetic construct
  source 1..20: mol_type = other RNA
attttctctcctcagcagag

SEQ ID NO: 2512 - RNA, 20 nt, synthetic construct
  source 1..20: mol_type = other RNA
caaaaacattttctcaaggt

SEQ ID NO: 2513 - RNA, 20 nt, synthetic construct
  source 1..20: mol_type = other RNA
caaacacagtccccatacag

SEQ ID NO: 2514 - RNA, 20 nt, synthetic construct
  source 1..20: mol_type = other RNA
caaacctaggtgttgtagcc

SEQ ID NO: 2515 - RNA, 20 nt, synthetic construct
  source 1..20: mol_type = other RNA
caaagccttgcaggtaatgt

SEQ ID NO: 2516 - RNA, 20 nt, synthetic construct
  source 1..20: mol_type = other RNA
caaaggaaaagagtggttca

SEQ ID NO: 2517 - RNA, 20 nt, synthetic construct
  source 1..20: mol_type = other RNA
caaaggaactgccagtatgg

SEQ ID NO: 2518 - RNA, 20 nt, synthetic construct
  source 1..20: mol_type = other RNA
caaaggcttttcaatgaaat

SEQ ID NO: 2519 - RNA, 20 nt, synthetic construct
  source 1..20: mol_type = other RNA
caaatcaattccctgttcta

SEQ ID NO: 2520 - RNA, 20 nt, synthetic construct
  source 1..20: mol_type = other RNA
caaatctcctgttatattct

SEQ ID NO: 2521 - RNA, 20 nt, synthetic construct
  source 1..20: mol_type = other RNA
caacacctaggtttgtgtaa

SEQ ID NO: 2522 - RNA, 20 nt, synthetic construct
  source 1..20: mol_type = other RNA
caacattatacaaaggaaaa

SEQ ID NO: 2523 - RNA, 20 nt, synthetic construct
  source 1..20: mol_type = other RNA
caactaaagatgcagagaag

SEQ ID NO: 2524 - RNA, 20 nt, synthetic construct
  source 1..20: mol_type = other RNA
caagagagagggaggaactt

SEQ ID NO: 2525 - RNA, 20 nt, synthetic construct
  source 1..20: mol_type = other RNA
caaggagctccagaagcaag

SEQ ID NO: 2526 - RNA, 20 nt, synthetic construct
  source 1..20: mol_type = other RNA
caaggctttgatctttcttc

SEQ ID NO: 2527 - RNA, 20 nt, synthetic construct
  source 1..20: mol_type = other RNA
caagttataacaatctgttt

SEQ ID NO: 2528 - RNA, 20 nt, synthetic construct
  source 1..20: mol_type = other RNA
caagttcctccctctctctt

SEQ ID NO: 2529 - RNA, 20 nt, synthetic construct
  source 1..20: mol_type = other RNA
caataccatactggcagttc

SEQ ID NO: 2530 - RNA, 20 nt, synthetic construct
  source 1..20: mol_type = other RNA
caataggctataccatgtag

SEQ ID NO: 2531 - RNA, 20 nt, synthetic construct
  source 1..20: mol_type = other RNA
caatctgtttccctttatct

SEQ ID NO: 2532 - RNA, 20 nt, synthetic construct
  source 1..20: mol_type = other RNA
caatgaaattctactgccca

SEQ ID NO: 2533 - RNA, 20 nt, synthetic construct
  source 1..20: mol_type = other RNA
caatgtaccctgggcagtag

SEQ ID NO: 2534 - RNA, 20 nt, synthetic construct
  source 1..20: mol_type = other RNA
caatgtggaaatggcagaag

SEQ ID NO: 2535 - RNA, 20 nt, synthetic construct
  source 1..20: mol_type = other RNA
caatgttctccacatagtga

SEQ ID NO: 2536 - RNA, 20 nt, synthetic construct
  source 1..20: mol_type = other RNA
caattccctgttctagaata

SEQ ID NO: 2537 - RNA, 20 nt, synthetic construct
  source 1..20: mol_type = other RNA
caatttactaacagtgtgac

SEQ ID NO: 2538 - RNA, 20 nt, synthetic construct
  source 1..20: mol_type = other RNA
cacaaacctaggtgttgtag

SEQ ID NO: 2539 - RNA, 20 nt, synthetic construct
  source 1..20: mol_type = other RNA
cacactgttagtaaattgta

SEQ ID NO: 2540 - RNA, 20 nt, synthetic construct
  source 1..20: mol_type = other RNA
cacaggagaagggaacatga

SEQ ID NO: 2541 - RNA, 20 nt, synthetic construct
  source 1..20: mol_type = other RNA
cacagtattcagtacagtaa

SEQ ID NO: 2542 - RNA, 20 nt, synthetic construct
  source 1..20: mol_type = other RNA
cacagtccccatacaggaat

SEQ ID NO: 2543 - RNA, 20 nt, synthetic construct
  source 1..20: mol_type = other RNA
cacatagtgagggttatcat

SEQ ID NO: 2544 - RNA, 20 nt, synthetic construct
  source 1..20: mol_type = other RNA
cacatgactatattagagtt

SEQ ID NO: 2545 - RNA, 20 nt, synthetic construct
  source 1..20: mol_type = other RNA
cacattacctgcaaggcttt

SEQ ID NO: 2546 - RNA, 20 nt, synthetic construct
  source 1..20: mol_type = other RNA
cacattggacatctctgctg

SEQ ID NO: 2547 - RNA, 20 nt, synthetic construct
  source 1..20: mol_type = other RNA
cacctaggtttgtgtaagca

SEQ ID NO: 2548 - RNA, 20 nt, synthetic construct
  source 1..20: mol_type = other RNA
cacctgcctttatcctgcaa

SEQ ID NO: 2549 - RNA, 20 nt, synthetic construct
  source 1..20: mol_type = other RNA
caccttcctgatgctctccc

SEQ ID NO: 2550 - RNA, 20 nt, synthetic construct
  source 1..20: mol_type = other RNA
caccttcttcatgccactcc

SEQ ID NO: 2551 - RNA, 20 nt, synthetic construct
  source 1..20: mol_type = other RNA
cacgcataggctacatggta

SEQ ID NO: 2552 - RNA, 20 nt, synthetic construct
  source 1..20: mol_type = other RNA
cactagaggagataaaggga

SEQ ID NO: 2553 - RNA, 20 nt, synthetic construct
  source 1..20: mol_type = other RNA
cactatgtggagaacattga

SEQ ID NO: 2554 - RNA, 20 nt, synthetic construct
  source 1..20: mol_type = other RNA
cactccacaggagaagggaa

SEQ ID NO: 2555 - RNA, 20 nt, synthetic construct
  source 1..20: mol_type = other RNA
cactcttttcctttgtataa

SEQ ID NO: 2556 - RNA, 20 nt, synthetic construct
  source 1..20: mol_type = other RNA
cactgtcctgaggactattt

SEQ ID NO: 2557 - RNA, 20 nt, synthetic construct
  source 1..20: mol_type = other RNA
cactgttagtaaattgtaga

SEQ ID NO: 2558 - RNA, 20 nt, synthetic construct
  source 1..20: mol_type = other RNA
cagaacatgtccccgtcatt

SEQ ID NO: 2559 - RNA, 20 nt, synthetic construct
  source 1..20: mol_type = other RNA
cagaagaaagatcaaagcct

SEQ ID NO: 2560 - RNA, 20 nt, synthetic construct
  source 1..20: mol_type = other RNA
cagaagagaggagttataca

SEQ ID NO: 2561 - RNA, 20 nt, synthetic construct
  source 1..20: mol_type = other RNA
cagaagcaagagagagggag

SEQ ID NO: 2562 - RNA, 20 nt, synthetic construct
  source 1..20: mol_type = other RNA
cagacagaagagaggagtta

SEQ ID NO: 2563 - RNA, 20 nt, synthetic construct
  source 1..20: mol_type = other RNA
cagacatcccattcctgtat

SEQ ID NO: 2564 - RNA, 20 nt, synthetic construct
  source 1..20: mol_type = other RNA
cagagaagtccaagttcctc

SEQ ID NO: 2565 - RNA, 20 nt, synthetic construct
  source 1..20: mol_type = other RNA
cagagagggcaaaggaactg

SEQ ID NO: 2566 - RNA, 20 nt, synthetic construct
  source 1..20: mol_type = other RNA
cagagatgtccaatgtggaa

SEQ ID NO: 2567 - RNA, 20 nt, synthetic construct
  source 1..20: mol_type = other RNA
cagagctgtataactcctct

SEQ ID NO: 2568 - RNA, 20 nt, synthetic construct
  source 1..20: mol_type = other RNA
cagagtaacattttagcagg

SEQ ID NO: 2569 - RNA, 20 nt, synthetic construct
  source 1..20: mol_type = other RNA
cagatcatccaccttcctga

SEQ ID NO: 2570 - RNA, 20 nt, synthetic construct
  source 1..20: mol_type = other RNA
cagattgttataacttgata

SEQ ID NO: 2571 - RNA, 20 nt, synthetic construct
  source 1..20: mol_type = other RNA
cagcagagatgtccaatgtg

SEQ ID NO: 2572 - RNA, 20 nt, synthetic construct
  source 1..20: mol_type = other RNA
cagcatcaatgtaccctggg

SEQ ID NO: 2573 - RNA, 20 nt, synthetic construct
  source 1..20: mol_type = other RNA
cagcctgttactgtactgaa

SEQ ID NO: 2574 - RNA, 20 nt, synthetic construct
  source 1..20: mol_type = other RNA
cagctctaacatgataaccc

SEQ ID NO: 2575 - RNA, 20 nt, synthetic construct
  source 1..20: mol_type = other RNA
cagctctgcagacatcccat

SEQ ID NO: 2576 - RNA, 20 nt, synthetic construct
  source 1..20: mol_type = other RNA
caggaaggtggatgatctgc

SEQ ID NO: 2577 - RNA, 20 nt, synthetic construct
  source 1..20: mol_type = other RNA
caggaatgggatgtctgcag

SEQ ID NO: 2578 - RNA, 20 nt, synthetic construct
  source 1..20: mol_type = other RNA
caggacagtgaaacaaaaac

SEQ ID NO: 2579 - RNA, 20 nt, synthetic construct
  source 1..20: mol_type = other RNA
caggacctgaactctaatat

SEQ ID NO: 2580 - RNA, 20 nt, synthetic construct
  source 1..20: mol_type = other RNA
caggagaagggaacatgacc

SEQ ID NO: 2581 - RNA, 20 nt, synthetic construct
  source 1..20: mol_type = other RNA
caggagatttgaatggggtt

SEQ ID NO: 2582 - RNA, 20 nt, synthetic construct
  source 1..20: mol_type = other RNA
caggataaaggcaggtggtt

SEQ ID NO: 2583 - RNA, 20 nt, synthetic construct
  source 1..20: mol_type = other RNA
caggccactagaggagataa

SEQ ID NO: 2584 - RNA, 20 nt, synthetic construct
  source 1..20: mol_type = other RNA
caggctgtacaggtttgtag

SEQ ID NO: 2585 - RNA, 20 nt, synthetic construct
  source 1..20: mol_type = other RNA
cagggaaagaagaatcctac

SEQ ID NO: 2586 - RNA, 20 nt, synthetic construct
  source 1..20: mol_type = other RNA
cagggaattgatttgggaga

SEQ ID NO: 2587 - RNA, 20 nt, synthetic construct
  source 1..20: mol_type = other RNA
cagggtacattgatgctgaa

SEQ ID NO: 2588 - RNA, 20 nt, synthetic construct
  source 1..20: mol_type = other RNA
cagggtcatgttcccttctc

SEQ ID NO: 2589 - RNA, 20 nt, synthetic construct
  source 1..20: mol_type = other RNA
caggtaatgtgggtaaccac

SEQ ID NO: 2590 - RNA, 20 nt, synthetic construct
  source 1..20: mol_type = other RNA
caggtatggccatattactg

SEQ ID NO: 2591 - RNA, 20 nt, synthetic construct
  source 1..20: mol_type = other RNA
caggtcctggctctacaatt

SEQ ID NO: 2592 - RNA, 20 nt, synthetic construct
  source 1..20: mol_type = other RNA
caggtggttacccacattac

SEQ ID NO: 2593 - RNA, 20 nt, synthetic construct
  source 1..20: mol_type = other RNA
cagtaacaggctgtacaggt

SEQ ID NO: 2594 - RNA, 20 nt, synthetic construct
  source 1..20: mol_type = other RNA
cagtaatatggccatacctg

SEQ ID NO: 2595 - RNA, 20 nt, synthetic construct
  source 1..20: mol_type = other RNA
cagtagaatttcattgaaaa

SEQ ID NO: 2596 - RNA, 20 nt, synthetic construct
  source 1..20: mol_type = other RNA
cagtatggtattgcaggata

SEQ ID NO: 2597 - RNA, 20 nt, synthetic construct
  source 1..20: mol_type = other RNA
cagtcacactgttagtaaat

SEQ ID NO: 2598 - RNA, 20 nt, synthetic construct
  source 1..20: mol_type = other RNA
cagtccccatacaggaatgg

SEQ ID NO: 2599 - RNA, 20 nt, synthetic construct
  source 1..20: mol_type = other RNA
cagtgaaacaaaaacatttt

SEQ ID NO: 2600 - RNA, 20 nt, synthetic construct
  source 1..20: mol_type = other RNA
cagtgtgactgggcagatca

SEQ ID NO: 2601 - RNA, 20 nt, synthetic construct
  source 1..20: mol_type = other RNA
cagttcctttgccctctctg

SEQ ID NO: 2602 - RNA, 20 nt, synthetic construct
  source 1..20: mol_type = other RNA
catacaccttcttcatgcca

SEQ ID NO: 2603 - RNA, 20 nt, synthetic construct
  source 1..20: mol_type = other RNA
catacaggaatgggatgtct

SEQ ID NO: 2604 - RNA, 20 nt, synthetic construct
  source 1..20: mol_type = other RNA
catacctggggccatacacc

SEQ ID NO: 2605 - RNA, 20 nt, synthetic construct
  source 1..20: mol_type = other RNA
catactggcagttcctttgc

SEQ ID NO: 2606 - RNA, 20 nt, synthetic construct
  source 1..20: mol_type = other RNA
catagtgagggttatcatgt

SEQ ID NO: 2607 - RNA, 20 nt, synthetic construct
  source 1..20: mol_type = other RNA
catattactgaccctctaca

SEQ ID NO: 2608 - RNA, 20 nt, synthetic construct
  source 1..20: mol_type = other RNA
catcaatgtaccctgggcag

SEQ ID NO: 2609 - RNA, 20 nt, synthetic construct
  source 1..20: mol_type = other RNA
catcaggaaggtggatgatc

SEQ ID NO: 2610 - RNA, 20 nt, synthetic construct
  source 1..20: mol_type = other RNA
catccaccttcctgatgctc

SEQ ID NO: 2611 - RNA, 20 nt, synthetic construct
  source 1..20: mol_type = other RNA
catcccattcctgtatgggg

SEQ ID NO: 2612 - RNA, 20 nt, synthetic construct
  source 1..20: mol_type = other RNA
catctctgctgaggagagaa

SEQ ID NO: 2613 - RNA, 20 nt, synthetic construct
  source 1..20: mol_type = other RNA
catctttagttggagtccaa

SEQ ID NO: 2614 - RNA, 20 nt, synthetic construct
  source 1..20: mol_type = other RNA
catgaagaaggtgtatggcc

SEQ ID NO: 2615 - RNA, 20 nt, synthetic construct
  source 1..20: mol_type = other RNA
catgaccctgtaggattctt

SEQ ID NO: 2616 - RNA, 20 nt, synthetic construct
  source 1..20: mol_type = other RNA
catgactatattagagttca

SEQ ID NO: 2617 - RNA, 20 nt, synthetic construct
  source 1..20: mol_type = other RNA
catgataaccctcactatgt

SEQ ID NO: 2618 - RNA, 20 nt, synthetic construct
  source 1..20: mol_type = other RNA
catgccactccacaggagaa

SEQ ID NO: 2619 - RNA, 20 nt, synthetic construct
  source 1..20: mol_type = other RNA
catggtatagcctattgctc

SEQ ID NO: 2620 - RNA, 20 nt, synthetic construct
  source 1..20: mol_type = other RNA
catgtagcctatgcgtgtag

SEQ ID NO: 2621 - RNA, 20 nt, synthetic construct
  source 1..20: mol_type = other RNA
catgtccccgtcattaagta

SEQ ID NO: 2622 - RNA, 20 nt, synthetic construct
  source 1..20: mol_type = other RNA
catgtgttacttaatgacgg

SEQ ID NO: 2623 - RNA, 20 nt, synthetic construct
  source 1..20: mol_type = other RNA
catgttagagctgtctataa

SEQ ID NO: 2624 - RNA, 20 nt, synthetic construct
  source 1..20: mol_type = other RNA
catgttcccttctcctgtgg

SEQ ID NO: 2625 - RNA, 20 nt, synthetic construct
  source 1..20: mol_type = other RNA
catgttctgagaaatgctta

SEQ ID NO: 2626 - RNA, 20 nt, synthetic construct
  source 1..20: mol_type = other RNA
cattaagtaacacatgacta

SEQ ID NO: 2627 - RNA, 20 nt, synthetic construct
  source 1..20: mol_type = other RNA
cattacctgcaaggctttga

SEQ ID NO: 2628 - RNA, 20 nt, synthetic construct
  source 1..20: mol_type = other RNA
cattatacaaaggaaaagag

SEQ ID NO: 2629 - RNA, 20 nt, synthetic construct
  source 1..20: mol_type = other RNA
cattcaaatctcctgttata

SEQ ID NO: 2630 - RNA, 20 nt, synthetic construct
  source 1..20: mol_type = other RNA
cattcctgtatggggactgt

SEQ ID NO: 2631 - RNA, 20 nt, synthetic construct
  source 1..20: mol_type = other RNA
cattgaaaagcctttggact

SEQ ID NO: 2632 - RNA, 20 nt, synthetic construct
  source 1..20: mol_type = other RNA
cattgacagagtaacatttt

SEQ ID NO: 2633 - RNA, 20 nt, synthetic construct
  source 1..20: mol_type = other RNA
cattgatgctgaaaccccat

SEQ ID NO: 2634 - RNA, 20 nt, synthetic construct
  source 1..20: mol_type = other RNA
cattggacatctctgctgag

SEQ ID NO: 2635 - RNA, 20 nt, synthetic construct
  source 1..20: mol_type = other RNA
catttccacattggacatct

SEQ ID NO: 2636 - RNA, 20 nt, synthetic construct
  source 1..20: mol_type = other RNA
catttctcagaacatgtccc

SEQ ID NO: 2637 - RNA, 20 nt, synthetic construct
  source 1..20: mol_type = other RNA
cattttagcagggaaagaag

SEQ ID NO: 2638 - RNA, 20 nt, synthetic construct
  source 1..20: mol_type = other RNA
cattttctctcctcagcaga

SEQ ID NO: 2639 - RNA, 20 nt, synthetic construct
  source 1..20: mol_type = other RNA
ccaaaggcttttcaatgaaa

SEQ ID NO: 2640 - RNA, 20 nt, synthetic construct
  source 1..20: mol_type = other RNA
ccaaatcaattccctgttct

SEQ ID NO: 2641 - RNA, 20 nt, synthetic construct
  source 1..20: mol_type = other RNA
ccaactaaagatgcagagaa

SEQ ID NO: 2642 - RNA, 20 nt, synthetic construct
  source 1..20: mol_type = other RNA
ccaagttcctccctctctct

SEQ ID NO: 2643 - RNA, 20 nt, synthetic construct
  source 1..20: mol_type = other RNA
ccaatgtggaaatggcagaa

SEQ ID NO: 2644 - RNA, 20 nt, synthetic construct
  source 1..20: mol_type = other RNA
ccacaggagaagggaacatg

SEQ ID NO: 2645 - RNA, 20 nt, synthetic construct
  source 1..20: mol_type = other RNA
ccacagtattcagtacagta

SEQ ID NO: 2646 - RNA, 20 nt, synthetic construct
  source 1..20: mol_type = other RNA
ccacatagtgagggttatca

SEQ ID NO: 2647 - RNA, 20 nt, synthetic construct
  source 1..20: mol_type = other RNA
ccacattacctgcaaggctt

SEQ ID NO: 2648 - RNA, 20 nt, synthetic construct
  source 1..20: mol_type = other RNA
ccacattggacatctctgct

SEQ ID NO: 2649 - RNA, 20 nt, synthetic construct
  source 1..20: mol_type = other RNA
ccacctgcctttatcctgca

SEQ ID NO: 2650 - RNA, 20 nt, synthetic construct
  source 1..20: mol_type = other RNA
ccaccttcctgatgctctcc

SEQ ID NO: 2651 - RNA, 20 nt, synthetic construct
  source 1..20: mol_type = other RNA
ccactagaggagataaaggg

SEQ ID NO: 2652 - RNA, 20 nt, synthetic construct
  source 1..20: mol_type = other RNA
ccactccacaggagaaggga

SEQ ID NO: 2653 - RNA, 20 nt, synthetic construct
  source 1..20: mol_type = other RNA
ccactcttttcctttgtata

SEQ ID NO: 2654 - RNA, 20 nt, synthetic construct
  source 1..20: mol_type = other RNA
ccagaagcaagagagaggga

SEQ ID NO: 2655 - RNA, 20 nt, synthetic construct
  source 1..20: mol_type = other RNA
ccaggacctgaactctaata

SEQ ID NO: 2656 - RNA, 20 nt, synthetic construct
  source 1..20: mol_type = other RNA
ccaggccactagaggagata

SEQ ID NO: 2657 - RNA, 20 nt, synthetic construct
  source 1..20: mol_type = other RNA
ccagggtacattgatgctga

SEQ ID NO: 2658 - RNA, 20 nt, synthetic construct
  source 1..20: mol_type = other RNA
ccaggtatggccatattact

SEQ ID NO: 2659 - RNA, 20 nt, synthetic construct
  source 1..20: mol_type = other RNA
ccagtatggtattgcaggat

SEQ ID NO: 2660 - RNA, 20 nt, synthetic construct
  source 1..20: mol_type = other RNA
ccagtcacactgttagtaaa

SEQ ID NO: 2661 - RNA, 20 nt, synthetic construct
  source 1..20: mol_type = other RNA
ccatacaccttcttcatgcc

SEQ ID NO: 2662 - RNA, 20 nt, synthetic construct
  source 1..20: mol_type = other RNA
ccatacaggaatgggatgtc

SEQ ID NO: 2663 - RNA, 20 nt, synthetic construct
  source 1..20: mol_type = other RNA
ccatacctggggccatacac

SEQ ID NO: 2664 - RNA, 20 nt, synthetic construct
  source 1..20: mol_type = other RNA
ccatactggcagttcctttg

SEQ ID NO: 2665 - RNA, 20 nt, synthetic construct
  source 1..20: mol_type = other RNA
ccatattactgaccctctac

SEQ ID NO: 2666 - RNA, 20 nt, synthetic construct
  source 1..20: mol_type = other RNA
ccatgtagcctatgcgtgta

SEQ ID NO: 2667 - RNA, 20 nt, synthetic construct
  source 1..20: mol_type = other RNA
ccattcaaatctcctgttat

SEQ ID NO: 2668 - RNA, 20 nt, synthetic construct
  source 1..20: mol_type = other RNA
ccattcctgtatggggactg

SEQ ID NO: 2669 - RNA, 20 nt, synthetic construct
  source 1..20: mol_type = other RNA
ccatttccacattggacatc

SEQ ID NO: 2670 - RNA, 20 nt, synthetic construct
  source 1..20: mol_type = other RNA
cccaaatcaattccctgttc

SEQ ID NO: 2671 - RNA, 20 nt, synthetic construct
  source 1..20: mol_type = other RNA
cccacagtattcagtacagt

SEQ ID NO: 2672 - RNA, 20 nt, synthetic construct
  source 1..20: mol_type = other RNA
cccacattacctgcaaggct

SEQ ID NO: 2673 - RNA, 20 nt, synthetic construct
  source 1..20: mol_type = other RNA
cccaggccactagaggagat

SEQ ID NO: 2674 - RNA, 20 nt, synthetic construct
  source 1..20: mol_type = other RNA
cccagggtacattgatgctg

SEQ ID NO: 2675 - RNA, 20 nt, synthetic construct
  source 1..20: mol_type = other RNA
cccaggtatggccatattac

SEQ ID NO: 2676 - RNA, 20 nt, synthetic construct
  source 1..20: mol_type = other RNA
cccagtcacactgttagtaa

SEQ ID NO: 2677 - RNA, 20 nt, synthetic construct
  source 1..20: mol_type = other RNA
cccatacaggaatgggatgt

SEQ ID NO: 2678 - RNA, 20 nt, synthetic construct
  source 1..20: mol_type = other RNA
cccattcaaatctcctgtta

SEQ ID NO: 2679 - RNA, 20 nt, synthetic construct
  source 1..20: mol_type = other RNA
cccattcctgtatggggact

SEQ ID NO: 2680 - RNA, 20 nt, synthetic construct
  source 1..20: mol_type = other RNA
ccccaggtatggccatatta

SEQ ID NO: 2681 - RNA, 20 nt, synthetic construct
  source 1..20: mol_type = other RNA
ccccatacaggaatgggatg

SEQ ID NO: 2682 - RNA, 20 nt, synthetic construct
  source 1..20: mol_type = other RNA
ccccattcaaatctcctgtt

SEQ ID NO: 2683 - RNA, 20 nt, synthetic construct
  source 1..20: mol_type = other RNA
ccccgtcattaagtaacaca

SEQ ID NO: 2684 - RNA, 20 nt, synthetic construct
  source 1..20: mol_type = other RNA
cccgtcattaagtaacacat

SEQ ID NO: 2685 - RNA, 20 nt, synthetic construct
  source 1..20: mol_type = other RNA
ccctcactatgtggagaaca

SEQ ID NO: 2686 - RNA, 20 nt, synthetic construct
  source 1..20: mol_type = other RNA
ccctctacagagagggcaaa

SEQ ID NO: 2687 - RNA, 20 nt, synthetic construct
  source 1..20: mol_type = other RNA
ccctctctcttgcttctgga

SEQ ID NO: 2688 - RNA, 20 nt, synthetic construct
  source 1..20: mol_type = other RNA
ccctctctgtagagggtcag

SEQ ID NO: 2689 - RNA, 20 nt, synthetic construct
  source 1..20: mol_type = other RNA
ccctgctaaaatgttactct

SEQ ID NO: 2690 - RNA, 20 nt, synthetic construct
  source 1..20: mol_type = other RNA
ccctgggcagtagaatttca

SEQ ID NO: 2691 - RNA, 20 nt, synthetic construct
  source 1..20: mol_type = other RNA
ccctgtaggattcttctttc

SEQ ID NO: 2692 - RNA, 20 nt, synthetic construct
  source 1..20: mol_type = other RNA
ccctgttctagaatataaca

SEQ ID NO: 2693 - RNA, 20 nt, synthetic construct
  source 1..20: mol_type = other RNA
cccttctcctgtggagtggc

SEQ ID NO: 2694 - RNA, 20 nt, synthetic construct
  source 1..20: mol_type = other RNA
ccctttatctcctctagtgg

SEQ ID NO: 2695 - RNA, 20 nt, synthetic construct
  source 1..20: mol_type = other RNA
ccgtcattaagtaacacatg

SEQ ID NO: 2696 - RNA, 20 nt, synthetic construct
  source 1..20: mol_type = other RNA
cctacagggtcatgttccct

SEQ ID NO: 2697 - RNA, 20 nt, synthetic construct
  source 1..20: mol_type = other RNA
cctactacacgcataggcta

SEQ ID NO: 2698 - RNA, 20 nt, synthetic construct
  source 1..20: mol_type = other RNA
cctagactacaaacctgtac

SEQ ID NO: 2699 - RNA, 20 nt, synthetic construct
  source 1..20: mol_type = other RNA
cctaggtgttgtagcctact

SEQ ID NO: 2700 - RNA, 20 nt, synthetic construct
  source 1..20: mol_type = other RNA
cctaggtttgtgtaagcatt

SEQ ID NO: 2701 - RNA, 20 nt, synthetic construct
  source 1..20: mol_type = other RNA
cctatgcgtgtagtaggcta

SEQ ID NO: 2702 - RNA, 20 nt, synthetic construct
  source 1..20: mol_type = other RNA
cctcactatgtggagaacat

SEQ ID NO: 2703 - RNA, 20 nt, synthetic construct
  source 1..20: mol_type = other RNA
cctcagcagagatgtccaat

SEQ ID NO: 2704 - RNA, 20 nt, synthetic construct
  source 1..20: mol_type = other RNA
cctcaggacagtgaaacaaa

SEQ ID NO: 2705 - RNA, 20 nt, synthetic construct
  source 1..20: mol_type = other RNA
cctccctctctcttgcttct

SEQ ID NO: 2706 - RNA, 20 nt, synthetic construct
  source 1..20: mol_type = other RNA
cctctaagaggcaaacacag

SEQ ID NO: 2707 - RNA, 20 nt, synthetic construct
  source 1..20: mol_type = other RNA
cctctacagagagggcaaag

SEQ ID NO: 2708 - RNA, 20 nt, synthetic construct
  source 1..20: mol_type = other RNA
cctctagtggcctgggaacc

SEQ ID NO: 2709 - RNA, 20 nt, synthetic construct
  source 1..20: mol_type = other RNA
cctctctcttgcttctggag

SEQ ID NO: 2710 - RNA, 20 nt, synthetic construct
  source 1..20: mol_type = other RNA
cctctctgtagagggtcagt

SEQ ID NO: 2711 - RNA, 20 nt, synthetic construct
  source 1..20: mol_type = other RNA
cctctcttctgtctgaagaa

SEQ ID NO: 2712 - RNA, 20 nt, synthetic construct
  source 1..20: mol_type = other RNA
cctcttagaggttcccaggc

SEQ ID NO: 2713 - RNA, 20 nt, synthetic construct
  source 1..20: mol_type = other RNA
cctgaactctaatatagtca

SEQ ID NO: 2714 - RNA, 20 nt, synthetic construct
  source 1..20: mol_type = other RNA
cctgaggactatttatagac

SEQ ID NO: 2715 - RNA, 20 nt, synthetic construct
  source 1..20: mol_type = other RNA
cctgatgctctcccaaatca

SEQ ID NO: 2716 - RNA, 20 nt, synthetic construct
  source 1..20: mol_type = other RNA
cctgcaaggctttgatcttt

SEQ ID NO: 2717 - RNA, 20 nt, synthetic construct
  source 1..20: mol_type = other RNA
cctgcaataccatactggca

SEQ ID NO: 2718 - RNA, 20 nt, synthetic construct
  source 1..20: mol_type = other RNA
cctgcctttatcctgcaata

SEQ ID NO: 2719 - RNA, 20 nt, synthetic construct
  source 1..20: mol_type = other RNA
cctgctaaaatgttactctg

SEQ ID NO: 2720 - RNA, 20 nt, synthetic construct
  source 1..20: mol_type = other RNA
cctggctctacaatttacta

SEQ ID NO: 2721 - RNA, 20 nt, synthetic construct
  source 1..20: mol_type = other RNA
cctgggaacctctaagaggc

SEQ ID NO: 2722 - RNA, 20 nt, synthetic construct
  source 1..20: mol_type = other RNA
cctgggcagtagaatttcat

SEQ ID NO: 2723 - RNA, 20 nt, synthetic construct
  source 1..20: mol_type = other RNA
cctggggccatacaccttct

SEQ ID NO: 2724 - RNA, 20 nt, synthetic construct
  source 1..20: mol_type = other RNA
cctgtaggattcttctttcc

SEQ ID NO: 2725 - RNA, 20 nt, synthetic construct
  source 1..20: mol_type = other RNA
cctgtatggggactgtgttt

SEQ ID NO: 2726 - RNA, 20 nt, synthetic construct
  source 1..20: mol_type = other RNA
cctgtggagtggcatgaaga

SEQ ID NO: 2727 - RNA, 20 nt, synthetic construct
  source 1..20: mol_type = other RNA
cctgttactgtactgaatac

SEQ ID NO: 2728 - RNA, 20 nt, synthetic construct
  source 1..20: mol_type = other RNA
cctgttatattctagaacag

SEQ ID NO: 2729 - RNA, 20 nt, synthetic construct
  source 1..20: mol_type = other RNA
cctgttctagaatataacag

SEQ ID NO: 2730 - RNA, 20 nt, synthetic construct
  source 1..20: mol_type = other RNA
ccttcctgatgctctcccaa

SEQ ID NO: 2731 - RNA, 20 nt, synthetic construct
  source 1..20: mol_type = other RNA
ccttctcctgtggagtggca

SEQ ID NO: 2732 - RNA, 20 nt, synthetic construct
  source 1..20: mol_type = other RNA
ccttcttcatgccactccac

SEQ ID NO: 2733 - RNA, 20 nt, synthetic construct
  source 1..20: mol_type = other RNA
ccttgagaaaatgtttttgt

SEQ ID NO: 2734 - RNA, 20 nt, synthetic construct
  source 1..20: mol_type = other RNA
ccttgcaggtaatgtgggta

SEQ ID NO: 2735 - RNA, 20 nt, synthetic construct
  source 1..20: mol_type = other RNA
ccttgtagttacatctatta

SEQ ID NO: 2736 - RNA, 20 nt, synthetic construct
  source 1..20: mol_type = other RNA
cctttatcctgcaataccat

SEQ ID NO: 2737 - RNA, 20 nt, synthetic construct
  source 1..20: mol_type = other RNA
cctttatctcctctagtggc

SEQ ID NO: 2738 - RNA, 20 nt, synthetic construct
  source 1..20: mol_type = other RNA
cctttgccctctctgtagag

SEQ ID NO: 2739 - RNA, 20 nt, synthetic construct
  source 1..20: mol_type = other RNA
cctttggactccaactaaag

SEQ ID NO: 2740 - RNA, 20 nt, synthetic construct
  source 1..20: mol_type = other RNA
cctttgtataatgttgtttt

SEQ ID NO: 2741 - RNA, 20 nt, synthetic construct
  source 1..20: mol_type = other RNA
cgcataggctacatggtata

SEQ ID NO: 2742 - RNA, 20 nt, synthetic construct
  source 1..20: mol_type = other RNA
cggggacatgttctgagaaa

SEQ ID NO: 2743 - RNA, 20 nt, synthetic construct
  source 1..20: mol_type = other RNA
cgtcattaagtaacacatga

SEQ ID NO: 2744 - RNA, 20 nt, synthetic construct
  source 1..20: mol_type = other RNA
cgtgtagtaggctacaacac

SEQ ID NO: 2745 - RNA, 20 nt, synthetic construct
  source 1..20: mol_type = other RNA
ctaaaatgttactctgtcaa

SEQ ID NO: 2746 - RNA, 20 nt, synthetic construct
  source 1..20: mol_type = other RNA
ctaaagatgcagagaagtcc

SEQ ID NO: 2747 - RNA, 20 nt, synthetic construct
  source 1..20: mol_type = other RNA
ctaacagtgtgactgggcag

SEQ ID NO: 2748 - RNA, 20 nt, synthetic construct
  source 1..20: mol_type = other RNA
ctaacatgataaccctcact

SEQ ID NO: 2749 - RNA, 20 nt, synthetic construct
  source 1..20: mol_type = other RNA
ctaagaggcaaacacagtcc

SEQ ID NO: 2750 - RNA, 20 nt, synthetic construct
  source 1..20: mol_type = other RNA
ctaatatagtcatgtgttac

SEQ ID NO: 2751 - RNA, 20 nt, synthetic construct
  source 1..20: mol_type = other RNA
ctacaacacctaggtttgtg

SEQ ID NO: 2752 - RNA, 20 nt, synthetic construct
  source 1..20: mol_type = other RNA
ctacaaggagctccagaagc

SEQ ID NO: 2753 - RNA, 20 nt, synthetic construct
  source 1..20: mol_type = other RNA
ctacaatttactaacagtgt

SEQ ID NO: 2754 - RNA, 20 nt, synthetic construct
  source 1..20: mol_type = other RNA
ctacacgcataggctacatg

SEQ ID NO: 2755 - RNA, 20 nt, synthetic construct
  source 1..20: mol_type = other RNA
ctacagagagggcaaaggaa

SEQ ID NO: 2756 - RNA, 20 nt, synthetic construct
  source 1..20: mol_type = other RNA
ctacagggtcatgttccctt

SEQ ID NO: 2757 - RNA, 20 nt, synthetic construct
  source 1..20: mol_type = other RNA
ctacatggtatagcctattg

SEQ ID NO: 2758 - RNA, 20 nt, synthetic construct
  source 1..20: mol_type = other RNA
ctactacacgcataggctac

SEQ ID NO: 2759 - RNA, 20 nt, synthetic construct
  source 1..20: mol_type = other RNA
ctactgcccagggtacattg

SEQ ID NO: 2760 - RNA, 20 nt, synthetic construct
  source 1..20: mol_type = other RNA
ctagaacagggaattgattt

SEQ ID NO: 2761 - RNA, 20 nt, synthetic construct
  source 1..20: mol_type = other RNA
ctagaatataacaggagatt

SEQ ID NO: 2762 - RNA, 20 nt, synthetic construct
  source 1..20: mol_type = other RNA
ctagactacaaacctgtaca

SEQ ID NO: 2763 - RNA, 20 nt, synthetic construct
  source 1..20: mol_type = other RNA
ctagaggagataaagggaaa

SEQ ID NO: 2764 - RNA, 20 nt, synthetic construct
  source 1..20: mol_type = other RNA
ctaggtgttgtagcctacta

SEQ ID NO: 2765 - RNA, 20 nt, synthetic construct
  source 1..20: mol_type = other RNA
ctaggtttgtgtaagcattt

SEQ ID NO: 2766 - RNA, 20 nt, synthetic construct
  source 1..20: mol_type = other RNA
ctagtggcctgggaacctct

SEQ ID NO: 2767 - RNA, 20 nt, synthetic construct
  source 1..20: mol_type = other RNA
ctataaatagtcctcaggac

SEQ ID NO: 2768 - RNA, 20 nt, synthetic construct
  source 1..20: mol_type = other RNA
ctataatagatgtaactaca

SEQ ID NO: 2769 - RNA, 20 nt, synthetic construct
  source 1..20: mol_type = other RNA
ctataccatgtagcctatgc

SEQ ID NO: 2770 - RNA, 20 nt, synthetic construct
  source 1..20: mol_type = other RNA
ctatattagagttcaggtcc

SEQ ID NO: 2771 - RNA, 20 nt, synthetic construct
  source 1..20: mol_type = other RNA
ctatgcgtgtagtaggctac

SEQ ID NO: 2772 - RNA, 20 nt, synthetic construct
  source 1..20: mol_type = other RNA
ctatgtggagaacattgaca

SEQ ID NO: 2773 - RNA, 20 nt, synthetic construct
  source 1..20: mol_type = other RNA
ctatttatagacagctctaa

SEQ ID NO: 2774 - RNA, 20 nt, synthetic construct
  source 1..20: mol_type = other RNA
ctcactatgtggagaacatt

SEQ ID NO: 2775 - RNA, 20 nt, synthetic construct
  source 1..20: mol_type = other RNA
ctcagaacatgtccccgtca

SEQ ID NO: 2776 - RNA, 20 nt, synthetic construct
  source 1..20: mol_type = other RNA
ctcagcagagatgtccaatg

SEQ ID NO: 2777 - RNA, 20 nt, synthetic construct
  source 1..20: mol_type = other RNA
ctcaggacagtgaaacaaaa

SEQ ID NO: 2778 - RNA, 20 nt, synthetic construct
  source 1..20: mol_type = other RNA
ctccaactaaagatgcagag

SEQ ID NO: 2779 - RNA, 20 nt, synthetic construct
  source 1..20: mol_type = other RNA
ctccacaggagaagggaaca

SEQ ID NO: 2780 - RNA, 20 nt, synthetic construct
  source 1..20: mol_type = other RNA
ctccacatagtgagggttat

SEQ ID NO: 2781 - RNA, 20 nt, synthetic construct
  source 1..20: mol_type = other RNA
ctccagaagcaagagagagg

SEQ ID NO: 2782 - RNA, 20 nt, synthetic construct
  source 1..20: mol_type = other RNA
ctcccaaatcaattccctgt

SEQ ID NO: 2783 - RNA, 20 nt, synthetic construct
  source 1..20: mol_type = other RNA
ctccctctctcttgcttctg

SEQ ID NO: 2784 - RNA, 20 nt, synthetic construct
  source 1..20: mol_type = other RNA
ctcctagactacaaacctgt

SEQ ID NO: 2785 - RNA, 20 nt, synthetic construct
  source 1..20: mol_type = other RNA
ctcctcagcagagatgtcca

SEQ ID NO: 2786 - RNA, 20 nt, synthetic construct
  source 1..20: mol_type = other RNA
ctcctctagtggcctgggaa

SEQ ID NO: 2787 - RNA, 20 nt, synthetic construct
  source 1..20: mol_type = other RNA
ctcctctcttctgtctgaag

SEQ ID NO: 2788 - RNA, 20 nt, synthetic construct
  source 1..20: mol_type = other RNA
ctcctgtggagtggcatgaa

SEQ ID NO: 2789 - RNA, 20 nt, synthetic construct
  source 1..20: mol_type = other RNA
ctcctgttatattctagaac

SEQ ID NO: 2790 - RNA, 20 nt, synthetic construct
  source 1..20: mol_type = other RNA
ctccttgtagttacatctat

SEQ ID NO: 2791 - RNA, 20 nt, synthetic construct
  source 1..20: mol_type = other RNA
ctctaacatgataaccctca

SEQ ID NO: 2792 - RNA, 20 nt, synthetic construct
  source 1..20: mol_type = other RNA
ctctaagaggcaaacacagt

SEQ ID NO: 2793 - RNA, 20 nt, synthetic construct
  source 1..20: mol_type = other RNA
ctctaatatagtcatgtgtt

SEQ ID NO: 2794 - RNA, 20 nt, synthetic construct
  source 1..20: mol_type = other RNA
ctctacaatttactaacagt

SEQ ID NO: 2795 - RNA, 20 nt, synthetic construct
  source 1..20: mol_type = other RNA
ctctacagagagggcaaagg

SEQ ID NO: 2796 - RNA, 20 nt, synthetic construct
  source 1..20: mol_type = other RNA
ctctagtggcctgggaacct

SEQ ID NO: 2797 - RNA, 20 nt, synthetic construct
  source 1..20: mol_type = other RNA
ctctcccaaatcaattccct

SEQ ID NO: 2798 - RNA, 20 nt, synthetic construct
  source 1..20: mol_type = other RNA
ctctcctcagcagagatgtc

SEQ ID NO: 2799 - RNA, 20 nt, synthetic construct
  source 1..20: mol_type = other RNA
ctctctcttgcttctggagc

SEQ ID NO: 2800 - RNA, 20 nt, synthetic construct
  source 1..20: mol_type = other RNA
ctctctgtagagggtcagta

SEQ ID NO: 2801 - RNA, 20 nt, synthetic construct
  source 1..20: mol_type = other RNA
ctctcttctgtctgaagaat

SEQ ID NO: 2802 - RNA, 20 nt, synthetic construct
  source 1..20: mol_type = other RNA
ctctcttgcttctggagctc

SEQ ID NO: 2803 - RNA, 20 nt, synthetic construct
  source 1..20: mol_type = other RNA
ctctgcagacatcccattcc

SEQ ID NO: 2804 - RNA, 20 nt, synthetic construct
  source 1..20: mol_type = other RNA
ctctgcatctttagttggag

SEQ ID NO: 2805 - RNA, 20 nt, synthetic construct
  source 1..20: mol_type = other RNA
ctctgctgaggagagaaaat

SEQ ID NO: 2806 - RNA, 20 nt, synthetic construct
  source 1..20: mol_type = other RNA
ctctgtagagggtcagtaat

SEQ ID NO: 2807 - RNA, 20 nt, synthetic construct
  source 1..20: mol_type = other RNA
ctctgtcaatgttctccaca

SEQ ID NO: 2808 - RNA, 20 nt, synthetic construct
  source 1..20: mol_type = other RNA
ctcttagaggttcccaggcc

SEQ ID NO: 2809 - RNA, 20 nt, synthetic construct
  source 1..20: mol_type = other RNA
ctcttctgtctgaagaataa

SEQ ID NO: 2810 - RNA, 20 nt, synthetic construct
  source 1..20: mol_type = other RNA
ctcttgcttctggagctcct

SEQ ID NO: 2811 - RNA, 20 nt, synthetic construct
  source 1..20: mol_type = other RNA
ctcttttcctttgtataatg

SEQ ID NO: 2812 - RNA, 20 nt, synthetic construct
  source 1..20: mol_type = other RNA
ctgaaaccccattcaaatct

SEQ ID NO: 2813 - RNA, 20 nt, synthetic construct
  source 1..20: mol_type = other RNA
ctgaactctaatatagtcat

SEQ ID NO: 2814 - RNA, 20 nt, synthetic construct
  source 1..20: mol_type = other RNA
ctgaagaataaaacaacatt

SEQ ID NO: 2815 - RNA, 20 nt, synthetic construct
  source 1..20: mol_type = other RNA
ctgaccctctacagagaggg

SEQ ID NO: 2816 - RNA, 20 nt, synthetic construct
  source 1..20: mol_type = other RNA
ctgagaaatgcttacacaaa

SEQ ID NO: 2817 - RNA, 20 nt, synthetic construct
  source 1..20: mol_type = other RNA
ctgaggactatttatagaca

SEQ ID NO: 2818 - RNA, 20 nt, synthetic construct
  source 1..20: mol_type = other RNA
ctgaggagagaaaatgaacc

SEQ ID NO: 2819 - RNA, 20 nt, synthetic construct
  source 1..20: mol_type = other RNA
ctgatgctctcccaaatcaa

SEQ ID NO: 2820 - RNA, 20 nt, synthetic construct
  source 1..20: mol_type = other RNA
ctgcaaggctttgatctttc

SEQ ID NO: 2821 - RNA, 20 nt, synthetic construct
  source 1..20: mol_type = other RNA
ctgcaataccatactggcag

SEQ ID NO: 2822 - RNA, 20 nt, synthetic construct
  source 1..20: mol_type = other RNA
ctgcagacatcccattcctg

SEQ ID NO: 2823 - RNA, 20 nt, synthetic construct
  source 1..20: mol_type = other RNA
ctgcagagctgtataactcc

SEQ ID NO: 2824 - RNA, 20 nt, synthetic construct
  source 1..20: mol_type = other RNA
ctgcatctttagttggagtc

SEQ ID NO: 2825 - RNA, 20 nt, synthetic construct
  source 1..20: mol_type = other RNA
ctgccagtatggtattgcag

SEQ ID NO: 2826 - RNA, 20 nt, synthetic construct
  source 1..20: mol_type = other RNA
ctgccatttccacattggac

SEQ ID NO: 2827 - RNA, 20 nt, synthetic construct
  source 1..20: mol_type = other RNA
ctgcccacagtattcagtac

SEQ ID NO: 2828 - RNA, 20 nt, synthetic construct
  source 1..20: mol_type = other RNA
ctgcccagggtacattgatg

SEQ ID NO: 2829 - RNA, 20 nt, synthetic construct
  source 1..20: mol_type = other RNA
ctgcccagtcacactgttag

SEQ ID NO: 2830 - RNA, 20 nt, synthetic construct
  source 1..20: mol_type = other RNA
ctgcctttatcctgcaatac

SEQ ID NO: 2831 - RNA, 20 nt, synthetic construct
  source 1..20: mol_type = other RNA
ctgctaaaatgttactctgt

SEQ ID NO: 2832 - RNA, 20 nt, synthetic construct
  source 1..20: mol_type = other RNA
ctgctgaggagagaaaatga

SEQ ID NO: 2833 - RNA, 20 nt, synthetic construct
  source 1..20: mol_type = other RNA
ctggagctccttgtagttac

SEQ ID NO: 2834 - RNA, 20 nt, synthetic construct
  source 1..20: mol_type = other RNA
ctggcagttcctttgccctc

SEQ ID NO: 2835 - RNA, 20 nt, synthetic construct
  source 1..20: mol_type = other RNA
ctggctctacaatttactaa

SEQ ID NO: 2836 - RNA, 20 nt, synthetic construct
  source 1..20: mol_type = other RNA
ctgggaacctctaagaggca

SEQ ID NO: 2837 - RNA, 20 nt, synthetic construct
  source 1..20: mol_type = other RNA
ctgggcagatcatccacctt

SEQ ID NO: 2838 - RNA, 20 nt, synthetic construct
  source 1..20: mol_type = other RNA
ctgggcagtagaatttcatt

SEQ ID NO: 2839 - RNA, 20 nt, synthetic construct
  source 1..20: mol_type = other RNA
ctggggccatacaccttctt

SEQ ID NO: 2840 - RNA, 20 nt, synthetic construct
  source 1..20: mol_type = other RNA
ctgtagagggtcagtaatat

SEQ ID NO: 2841 - RNA, 20 nt, synthetic construct
  source 1..20: mol_type = other RNA
ctgtaggattcttctttccc

SEQ ID NO: 2842 - RNA, 20 nt, synthetic construct
  source 1..20: mol_type = other RNA
ctgtataactcctctcttct

SEQ ID NO: 2843 - RNA, 20 nt, synthetic construct
  source 1..20: mol_type = other RNA
ctgtatggggactgtgtttg

SEQ ID NO: 2844 - RNA, 20 nt, synthetic construct
  source 1..20: mol_type = other RNA
ctgtcaatgttctccacata

SEQ ID NO: 2845 - RNA, 20 nt, synthetic construct
  source 1..20: mol_type = other RNA
ctgtcctgaggactatttat

SEQ ID NO: 2846 - RNA, 20 nt, synthetic construct
  source 1..20: mol_type = other RNA
ctgtctataaatagtcctca

SEQ ID NO: 2847 - RNA, 20 nt, synthetic construct
  source 1..20: mol_type = other RNA
ctgtctgaagaataaaacaa

SEQ ID NO: 2848 - RNA, 20 nt, synthetic construct
  source 1..20: mol_type = other RNA
ctgtggagtggcatgaagaa

SEQ ID NO: 2849 - RNA, 20 nt, synthetic construct
  source 1..20: mol_type = other RNA
ctgtgtttgcctcttagagg

SEQ ID NO: 2850 - RNA, 20 nt, synthetic construct
  source 1..20: mol_type = other RNA
ctgttactgtactgaatact

SEQ ID NO: 2851 - RNA, 20 nt, synthetic construct
  source 1..20: mol_type = other RNA
ctgttagtaaattgtagagc

SEQ ID NO: 2852 - RNA, 20 nt, synthetic construct
  source 1..20: mol_type = other RNA
ctgttatattctagaacagg

SEQ ID NO: 2853 - RNA, 20 nt, synthetic construct
  source 1..20: mol_type = other RNA
ctgttctagaatataacagg

SEQ ID NO: 2854 - RNA, 20 nt, synthetic construct
  source 1..20: mol_type = other RNA
ctgtttccctttatctcctc

SEQ ID NO: 2855 - RNA, 20 nt, synthetic construct
  source 1..20: mol_type = other RNA
cttaatgacggggacatgtt

SEQ ID NO: 2856 - RNA, 20 nt, synthetic construct
  source 1..20: mol_type = other RNA
cttacacaaacctaggtgtt

SEQ ID NO: 2857 - RNA, 20 nt, synthetic construct
  source 1..20: mol_type = other RNA
cttagaggttcccaggccac

SEQ ID NO: 2858 - RNA, 20 nt, synthetic construct
  source 1..20: mol_type = other RNA
cttcagacagaagagaggag

SEQ ID NO: 2859 - RNA, 20 nt, synthetic construct
  source 1..20: mol_type = other RNA
cttcatgccactccacagga

SEQ ID NO: 2860 - RNA, 20 nt, synthetic construct
  source 1..20: mol_type = other RNA
cttcctgatgctctcccaaa

SEQ ID NO: 2861 - RNA, 20 nt, synthetic construct
  source 1..20: mol_type = other RNA
cttctcctgtggagtggcat

SEQ ID NO: 2862 - RNA, 20 nt, synthetic construct
  source 1..20: mol_type = other RNA
cttctctgcatctttagttg

SEQ ID NO: 2863 - RNA, 20 nt, synthetic construct
  source 1..20: mol_type = other RNA
cttctgccatttccacattg

SEQ ID NO: 2864 - RNA, 20 nt, synthetic construct
  source 1..20: mol_type = other RNA
cttctggagctccttgtagt

SEQ ID NO: 2865 - RNA, 20 nt, synthetic construct
  source 1..20: mol_type = other RNA
cttctgtctgaagaataaaa

SEQ ID NO: 2866 - RNA, 20 nt, synthetic construct
  source 1..20: mol_type = other RNA
cttcttcatgccactccaca

SEQ ID NO: 2867 - RNA, 20 nt, synthetic construct
  source 1..20: mol_type = other RNA
cttctttccctgctaaaatg

SEQ ID NO: 2868 - RNA, 20 nt, synthetic construct
  source 1..20: mol_type = other RNA
cttgagaaaatgtttttgtt

SEQ ID NO: 2869 - RNA, 20 nt, synthetic construct
  source 1..20: mol_type = other RNA
cttgcaggtaatgtgggtaa

SEQ ID NO: 2870 - RNA, 20 nt, synthetic construct
  source 1..20: mol_type = other RNA
cttgcttctggagctccttg

SEQ ID NO: 2871 - RNA, 20 nt, synthetic construct
  source 1..20: mol_type = other RNA
cttggacttctctgcatctt

SEQ ID NO: 2872 - RNA, 20 nt, synthetic construct
  source 1..20: mol_type = other RNA
cttgtagttacatctattat

SEQ ID NO: 2873 - RNA, 20 nt, synthetic construct
  source 1..20: mol_type = other RNA
ctttagttggagtccaaagg

SEQ ID NO: 2874 - RNA, 20 nt, synthetic construct
  source 1..20: mol_type = other RNA
ctttatcctgcaataccata

SEQ ID NO: 2875 - RNA, 20 nt, synthetic construct
  source 1..20: mol_type = other RNA
ctttatctcctctagtggcc

SEQ ID NO: 2876 - RNA, 20 nt, synthetic construct
  source 1..20: mol_type = other RNA
ctttccctgctaaaatgtta

SEQ ID NO: 2877 - RNA, 20 nt, synthetic construct
  source 1..20: mol_type = other RNA
ctttcttctgccatttccac

SEQ ID NO: 2878 - RNA, 20 nt, synthetic construct
  source 1..20: mol_type = other RNA
ctttgatctttcttctgcca

SEQ ID NO: 2879 - RNA, 20 nt, synthetic construct
  source 1..20: mol_type = other RNA
ctttgccctctctgtagagg

SEQ ID NO: 2880 - RNA, 20 nt, synthetic construct
  source 1..20: mol_type = other RNA
ctttggactccaactaaaga

SEQ ID NO: 2881 - RNA, 20 nt, synthetic construct
  source 1..20: mol_type = other RNA
cttttcaatgaaattctact

SEQ ID NO: 2882 - RNA, 20 nt, synthetic construct
  source 1..20: mol_type = other RNA
cttttcctttgtataatgtt

SEQ ID NO: 2883 - RNA, 20 nt, synthetic construct
  source 1..20: mol_type = other RNA
gaaaagagtggttcattttc

SEQ ID NO: 2884 - RNA, 20 nt, synthetic construct
  source 1..20: mol_type = other RNA
gaaaagcctttggactccaa

SEQ ID NO: 2885 - RNA, 20 nt, synthetic construct
  source 1..20: mol_type = other RNA
gaaaatgaaccactcttttc

SEQ ID NO: 2886 - RNA, 20 nt, synthetic construct
  source 1..20: mol_type = other RNA
gaaaatgtttttgtttcact

SEQ ID NO: 2887 - RNA, 20 nt, synthetic construct
  source 1..20: mol_type = other RNA
gaaacaaaaacattttctca

SEQ ID NO: 2888 - RNA, 20 nt, synthetic construct
  source 1..20: mol_type = other RNA
gaaacagattgttataactt

SEQ ID NO: 2889 - RNA, 20 nt, synthetic construct
  source 1..20: mol_type = other RNA
gaaaccccattcaaatctcc

SEQ ID NO: 2890 - RNA, 20 nt, synthetic construct
  source 1..20: mol_type = other RNA
gaaagaagaatcctacaggg

SEQ ID NO: 2891 - RNA, 20 nt, synthetic construct
  source 1..20: mol_type = other RNA
gaaagatcaaagccttgcag

SEQ ID NO: 2892 - RNA, 20 nt, synthetic construct
  source 1..20: mol_type = other RNA
gaaatgcttacacaaaccta

SEQ ID NO: 2893 - RNA, 20 nt, synthetic construct
  source 1..20: mol_type = other RNA
gaaatggcagaagaaagatc

SEQ ID NO: 2894 - RNA, 20 nt, synthetic construct
  source 1..20: mol_type = other RNA
gaaattctactgcccagggt

SEQ ID NO: 2895 - RNA, 20 nt, synthetic construct
  source 1..20: mol_type = other RNA
gaacagggaattgatttggg

SEQ ID NO: 2896 - RNA, 20 nt, synthetic construct
  source 1..20: mol_type = other RNA
gaacatgaccctgtaggatt

SEQ ID NO: 2897 - RNA, 20 nt, synthetic construct
  source 1..20: mol_type = other RNA
gaacatgtccccgtcattaa

SEQ ID NO: 2898 - RNA, 20 nt, synthetic construct
  source 1..20: mol_type = other RNA
gaacattgacagagtaacat

SEQ ID NO: 2899 - RNA, 20 nt, synthetic construct
  source 1..20: mol_type = other RNA
gaaccactcttttcctttgt

SEQ ID NO: 2900 - RNA, 20 nt, synthetic construct
  source 1..20: mol_type = other RNA
gaacctctaagaggcaaaca

SEQ ID NO: 2901 - RNA, 20 nt, synthetic construct
  source 1..20: mol_type = other RNA
gaactctaatatagtcatgt

SEQ ID NO: 2902 - RNA, 20 nt, synthetic construct
  source 1..20: mol_type = other RNA
gaactgccagtatggtattg

SEQ ID NO: 2903 - RNA, 20 nt, synthetic construct
  source 1..20: mol_type = other RNA
gaacttggacttctctgcat

SEQ ID NO: 2904 - RNA, 20 nt, synthetic construct
  source 1..20: mol_type = other RNA
gaagaaagatcaaagccttg

SEQ ID NO: 2905 - RNA, 20 nt, synthetic construct
  source 1..20: mol_type = other RNA
gaagaaggtgtatggcccca

SEQ ID NO: 2906 - RNA, 20 nt, synthetic construct
  source 1..20: mol_type = other RNA
gaagaatcctacagggtcat

SEQ ID NO: 2907 - RNA, 20 nt, synthetic construct
  source 1..20: mol_type = other RNA
gaagagaggagttatacagc

SEQ ID NO: 2908 - RNA, 20 nt, synthetic construct
  source 1..20: mol_type = other RNA
gaagcaagagagagggagga

SEQ ID NO: 2909 - RNA, 20 nt, synthetic construct
  source 1..20: mol_type = other RNA
gaagggaacatgaccctgta

SEQ ID NO: 2910 - RNA, 20 nt, synthetic construct
  source 1..20: mol_type = other RNA
gaaggtggatgatctgccca

SEQ ID NO: 2911 - RNA, 20 nt, synthetic construct
  source 1..20: mol_type = other RNA
gaaggtgtatggccccaggt

SEQ ID NO: 2912 - RNA, 20 nt, synthetic construct
  source 1..20: mol_type = other RNA
gaagtccaagttcctccctc

SEQ ID NO: 2913 - RNA, 20 nt, synthetic construct
  source 1..20: mol_type = other RNA
gaatataacaggagatttga

SEQ ID NO: 2914 - RNA, 20 nt, synthetic construct
  source 1..20: mol_type = other RNA
gaatcctacagggtcatgtt

SEQ ID NO: 2915 - RNA, 20 nt, synthetic construct
  source 1..20: mol_type = other RNA
gaatgggatgtctgcagagc

SEQ ID NO: 2916 - RNA, 20 nt, synthetic construct
  source 1..20: mol_type = other RNA
gaatggggtttcagcatcaa

SEQ ID NO: 2917 - RNA, 20 nt, synthetic construct
  source 1..20: mol_type = other RNA
gaattgatttgggagagcat

SEQ ID NO: 2918 - RNA, 20 nt, synthetic construct
  source 1..20: mol_type = other RNA
gaatttcattgaaaagcctt

SEQ ID NO: 2919 - RNA, 20 nt, synthetic construct
  source 1..20: mol_type = other RNA
gacagaagagaggagttata

SEQ ID NO: 2920 - RNA, 20 nt, synthetic construct
  source 1..20: mol_type = other RNA
gacagagtaacattttagca

SEQ ID NO: 2921 - RNA, 20 nt, synthetic construct
  source 1..20: mol_type = other RNA
gacagctctaacatgataac

SEQ ID NO: 2922 - RNA, 20 nt, synthetic construct
  source 1..20: mol_type = other RNA
gacagtgaaacaaaaacatt

SEQ ID NO: 2923 - RNA, 20 nt, synthetic construct
  source 1..20: mol_type = other RNA
gacatcccattcctgtatgg

SEQ ID NO: 2924 - RNA, 20 nt, synthetic construct
  source 1..20: mol_type = other RNA
gacatctctgctgaggagag

SEQ ID NO: 2925 - RNA, 20 nt, synthetic construct
  source 1..20: mol_type = other RNA
gacatgttctgagaaatgct

SEQ ID NO: 2926 - RNA, 20 nt, synthetic construct
  source 1..20: mol_type = other RNA
gaccctctacagagagggca

SEQ ID NO: 2927 - RNA, 20 nt, synthetic construct
  source 1..20: mol_type = other RNA
gaccctgtaggattcttctt

SEQ ID NO: 2928 - RNA, 20 nt, synthetic construct
  source 1..20: mol_type = other RNA
gacctgaactctaatatagt

SEQ ID NO: 2929 - RNA, 20 nt, synthetic construct
  source 1..20: mol_type = other RNA
gaccttgagaaaatgttttt

SEQ ID NO: 2930 - RNA, 20 nt, synthetic construct
  source 1..20: mol_type = other RNA
gacggggacatgttctgaga

SEQ ID NO: 2931 - RNA, 20 nt, synthetic construct
  source 1..20: mol_type = other RNA
gactacaaacctgtacagcc

SEQ ID NO: 2932 - RNA, 20 nt, synthetic construct
  source 1..20: mol_type = other RNA
gactatattagagttcaggt

SEQ ID NO: 2933 - RNA, 20 nt, synthetic construct
  source 1..20: mol_type = other RNA
gactatttatagacagctct

SEQ ID NO: 2934 - RNA, 20 nt, synthetic construct
  source 1..20: mol_type = other RNA
gactccaactaaagatgcag

SEQ ID NO: 2935 - RNA, 20 nt, synthetic construct
  source 1..20: mol_type = other RNA
gactgggcagatcatccacc

SEQ ID NO: 2936 - RNA, 20 nt, synthetic construct
  source 1..20: mol_type = other RNA
gactgtgtttgcctcttaga

SEQ ID NO: 2937 - RNA, 20 nt, synthetic construct
  source 1..20: mol_type = other RNA
gacttctctgcatctttagt

SEQ ID NO: 2938 - RNA, 20 nt, synthetic construct
  source 1..20: mol_type = other RNA
gagaaaatgaaccactcttt

SEQ ID NO: 2939 - RNA, 20 nt, synthetic construct
  source 1..20: mol_type = other RNA
gagaaaatgtttttgtttca

SEQ ID NO: 2940 - RNA, 20 nt, synthetic construct
  source 1..20: mol_type = other RNA
gagaaatgcttacacaaacc

SEQ ID NO: 2941 - RNA, 20 nt, synthetic construct
  source 1..20: mol_type = other RNA
gagaacattgacagagtaac

SEQ ID NO: 2942 - RNA, 20 nt, synthetic construct
  source 1..20: mol_type = other RNA
gagaagggaacatgaccctg

SEQ ID NO: 2943 - RNA, 20 nt, synthetic construct
  source 1..20: mol_type = other RNA
gagaagtccaagttcctccc

SEQ ID NO: 2944 - RNA, 20 nt, synthetic construct
  source 1..20: mol_type = other RNA
gagagaaaatgaaccactct

SEQ ID NO: 2945 - RNA, 20 nt, synthetic construct
  source 1..20: mol_type = other RNA
gagagagggaggaacttgga

SEQ ID NO: 2946 - RNA, 20 nt, synthetic construct
  source 1..20: mol_type = other RNA
gagagcatcaggaaggtgga

SEQ ID NO: 2947 - RNA, 20 nt, synthetic construct
  source 1..20: mol_type = other RNA
gagaggagttatacagctct

SEQ ID NO: 2948 - RNA, 20 nt, synthetic construct
  source 1..20: mol_type = other RNA
gagagggaggaacttggact

SEQ ID NO: 2949 - RNA, 20 nt, synthetic construct
  source 1..20: mol_type = other RNA
gagagggcaaaggaactgcc

SEQ ID NO: 2950 - RNA, 20 nt, synthetic construct
  source 1..20: mol_type = other RNA
gagataaagggaaacagatt

SEQ ID NO: 2951 - RNA, 20 nt, synthetic construct
  source 1..20: mol_type = other RNA
gagatgtccaatgtggaaat

SEQ ID NO: 2952 - RNA, 20 nt, synthetic construct
  source 1..20: mol_type = other RNA
gagatttgaatggggtttca

SEQ ID NO: 2953 - RNA, 20 nt, synthetic construct
  source 1..20: mol_type = other RNA
gagcatcaggaaggtggatg

SEQ ID NO: 2954 - RNA, 20 nt, synthetic construct
  source 1..20: mol_type = other RNA
gagccaggacctgaactcta

SEQ ID NO: 2955 - RNA, 20 nt, synthetic construct
  source 1..20: mol_type = other RNA
gagctccagaagcaagagag

SEQ ID NO: 2956 - RNA, 20 nt, synthetic construct
  source 1..20: mol_type = other RNA
gagctccttgtagttacatc

SEQ ID NO: 2957 - RNA, 20 nt, synthetic construct
  source 1..20: mol_type = other RNA
gagctgtataactcctctct

SEQ ID NO: 2958 - RNA, 20 nt, synthetic construct
  source 1..20: mol_type = other RNA
gagctgtctataaatagtcc

SEQ ID NO: 2959 - RNA, 20 nt, synthetic construct
  source 1..20: mol_type = other RNA
gaggaacttggacttctctg

SEQ ID NO: 2960 - RNA, 20 nt, synthetic construct
  source 1..20: mol_type = other RNA
gaggactatttatagacagc

SEQ ID NO: 2961 - RNA, 20 nt, synthetic construct
  source 1..20: mol_type = other RNA
gaggagagaaaatgaaccac

SEQ ID NO: 2962 - RNA, 20 nt, synthetic construct
  source 1..20: mol_type = other RNA
gaggagataaagggaaacag

SEQ ID NO: 2963 - RNA, 20 nt, synthetic construct
  source 1..20: mol_type = other RNA
gaggagttatacagctctgc

SEQ ID NO: 2964 - RNA, 20 nt, synthetic construct
  source 1..20: mol_type = other RNA
gaggcaaacacagtccccat

SEQ ID NO: 2965 - RNA, 20 nt, synthetic construct
  source 1..20: mol_type = other RNA
gagggaggaacttggacttc

SEQ ID NO: 2966 - RNA, 20 nt, synthetic construct
  source 1..20: mol_type = other RNA
gagggcaaaggaactgccag

SEQ ID NO: 2967 - RNA, 20 nt, synthetic construct
  source 1..20: mol_type = other RNA
gagggtcagtaatatggcca

SEQ ID NO: 2968 - RNA, 20 nt, synthetic construct
  source 1..20: mol_type = other RNA
gagggttatcatgttagagc

SEQ ID NO: 2969 - RNA, 20 nt, synthetic construct
  source 1..20: mol_type = other RNA
gaggttcccaggccactaga

SEQ ID NO: 2970 - RNA, 20 nt, synthetic construct
  source 1..20: mol_type = other RNA
gagtaacattttagcaggga

SEQ ID NO: 2971 - RNA, 20 nt, synthetic construct
  source 1..20: mol_type = other RNA
gagtccaaaggcttttcaat

SEQ ID NO: 2972 - RNA, 20 nt, synthetic construct
  source 1..20: mol_type = other RNA
gagtggcatgaagaaggtgt

SEQ ID NO: 2973 - RNA, 20 nt, synthetic construct
  source 1..20: mol_type = other RNA
gagtggttcattttctctcc

SEQ ID NO: 2974 - RNA, 20 nt, synthetic construct
  source 1..20: mol_type = other RNA
gagttatacagctctgcaga

SEQ ID NO: 2975 - RNA, 20 nt, synthetic construct
  source 1..20: mol_type = other RNA
gagttcaggtcctggctcta

SEQ ID NO: 2976 - RNA, 20 nt, synthetic construct
  source 1..20: mol_type = other RNA
gataaaggcaggtggttacc

SEQ ID NO: 2977 - RNA, 20 nt, synthetic construct
  source 1..20: mol_type = other RNA
gataaagggaaacagattgt

SEQ ID NO: 2978 - RNA, 20 nt, synthetic construct
  source 1..20: mol_type = other RNA
gataaccctcactatgtgga

SEQ ID NO: 2979 - RNA, 20 nt, synthetic construct
  source 1..20: mol_type = other RNA
gatactataatagatgtaac

SEQ ID NO: 2980 - RNA, 20 nt, synthetic construct
  source 1..20: mol_type = other RNA
gatcaaagccttgcaggtaa

SEQ ID NO: 2981 - RNA, 20 nt, synthetic construct
  source 1..20: mol_type = other RNA
gatcatccaccttcctgatg

SEQ ID NO: 2982 - RNA, 20 nt, synthetic construct
  source 1..20: mol_type = other RNA
gatctgcccagtcacactgt

SEQ ID NO: 2983 - RNA, 20 nt, synthetic construct
  source 1..20: mol_type = other RNA
gatctttcttctgccatttc

SEQ ID NO: 2984 - RNA, 20 nt, synthetic construct
  source 1..20: mol_type = other RNA
gatgatctgcccagtcacac

SEQ ID NO: 2985 - RNA, 20 nt, synthetic construct
  source 1..20: mol_type = other RNA
gatgcagagaagtccaagtt

SEQ ID NO: 2986 - RNA, 20 nt, synthetic construct
  source 1..20: mol_type = other RNA
gatgctctcccaaatcaatt

SEQ ID NO: 2987 - RNA, 20 nt, synthetic construct
  source 1..20: mol_type = other RNA
gatgctgaaaccccattcaa

SEQ ID NO: 2988 - RNA, 20 nt, synthetic construct
  source 1..20: mol_type = other RNA
gatgtaactacaaggagctc

SEQ ID NO: 2989 - RNA, 20 nt, synthetic construct
  source 1..20: mol_type = other RNA
gatgtccaatgtggaaatgg

SEQ ID NO: 2990 - RNA, 20 nt, synthetic construct
  source 1..20: mol_type = other RNA
gatgtctgcagagctgtata

SEQ ID NO: 2991 - RNA, 20 nt, synthetic construct
  source 1..20: mol_type = other RNA
gattcttctttccctgctaa

SEQ ID NO: 2992 - RNA, 20 nt, synthetic construct
  source 1..20: mol_type = other RNA
gatttgaatggggtttcagc

SEQ ID NO: 2993 - RNA, 20 nt, synthetic construct
  source 1..20: mol_type = other RNA
gatttgggagagcatcagga

SEQ ID NO: 2994 - RNA, 20 nt, synthetic construct
  source 1..20: mol_type = other RNA
gcaaacacagtccccataca

SEQ ID NO: 2995 - RNA, 20 nt, synthetic construct
  source 1..20: mol_type = other RNA
gcaaaggaactgccagtatg

SEQ ID NO: 2996 - RNA, 20 nt, synthetic construct
  source 1..20: mol_type = other RNA
gcaagagagagggaggaact

SEQ ID NO: 2997 - RNA, 20 nt, synthetic construct
  source 1..20: mol_type = other RNA
gcaaggctttgatctttctt

SEQ ID NO: 2998 - RNA, 20 nt, synthetic construct
  source 1..20: mol_type = other RNA
gcaataccatactggcagtt

SEQ ID NO: 2999 - RNA, 20 nt, synthetic construct
  source 1..20: mol_type = other RNA
gcaataggctataccatgta

SEQ ID NO: 3000 - RNA, 20 nt, synthetic construct
  source 1..20: mol_type = other RNA
gcagaagaaagatcaaagcc

SEQ ID NO: 3001 - RNA, 20 nt, synthetic construct
  source 1..20: mol_type = other RNA
gcagacatcccattcctgta

SEQ ID NO: 3002 - RNA, 20 nt, synthetic construct
  source 1..20: mol_type = other RNA
gcagagaagtccaagttcct

SEQ ID NO: 3003 - RNA, 20 nt, synthetic construct
  source 1..20: mol_type = other RNA
gcagagatgtccaatgtgga

SEQ ID NO: 3004 - RNA, 20 nt, synthetic construct
  source 1..20: mol_type = other RNA
gcagagctgtataactcctc

SEQ ID NO: 3005 - RNA, 20 nt, synthetic construct
  source 1..20: mol_type = other RNA
gcagatcatccaccttcctg

SEQ ID NO: 3006 - RNA, 20 nt, synthetic construct
  source 1..20: mol_type = other RNA
gcaggataaaggcaggtggt

SEQ ID NO: 3007 - RNA, 20 nt, synthetic construct
  source 1..20: mol_type = other RNA
gcagggaaagaagaatccta

SEQ ID NO: 3008 - RNA, 20 nt, synthetic construct
  source 1..20: mol_type = other RNA
gcaggtaatgtgggtaacca

SEQ ID NO: 3009 - RNA, 20 nt, synthetic construct
  source 1..20: mol_type = other RNA
gcaggtggttacccacatta

SEQ ID NO: 3010 - RNA, 20 nt, synthetic construct
  source 1..20: mol_type = other RNA
gcagtagaatttcattgaaa

SEQ ID NO: 3011 - RNA, 20 nt, synthetic construct
  source 1..20: mol_type = other RNA
gcagttcctttgccctctct

SEQ ID NO: 3012 - RNA, 20 nt, synthetic construct
  source 1..20: mol_type = other RNA
gcataggctacatggtatag

SEQ ID NO: 3013 - RNA, 20 nt, synthetic construct
  source 1..20: mol_type = other RNA
gcatcaatgtaccctgggca

SEQ ID NO: 3014 - RNA, 20 nt, synthetic construct
  source 1..20: mol_type = other RNA
gcatcaggaaggtggatgat

SEQ ID NO: 3015 - RNA, 20 nt, synthetic construct
  source 1..20: mol_type = other RNA
gcatctttagttggagtcca

SEQ ID NO: 3016 - RNA, 20 nt, synthetic construct
  source 1..20: mol_type = other RNA
gcatgaagaaggtgtatggc

SEQ ID NO: 3017 - RNA, 20 nt, synthetic construct
  source 1..20: mol_type = other RNA
gcatttctcagaacatgtcc

SEQ ID NO: 3018 - RNA, 20 nt, synthetic construct
  source 1..20: mol_type = other RNA
gccactagaggagataaagg

SEQ ID NO: 3019 - RNA, 20 nt, synthetic construct
  source 1..20: mol_type = other RNA
gccactccacaggagaaggg

SEQ ID NO: 3020 - RNA, 20 nt, synthetic construct
  source 1..20: mol_type = other RNA
gccaggacctgaactctaat

SEQ ID NO: 3021 - RNA, 20 nt, synthetic construct
  source 1..20: mol_type = other RNA
gccagtatggtattgcagga

SEQ ID NO: 3022 - RNA, 20 nt, synthetic construct
  source 1..20: mol_type = other RNA
gccatacaccttcttcatgc

SEQ ID NO: 3023 - RNA, 20 nt, synthetic construct
  source 1..20: mol_type = other RNA
gccatacctggggccataca

SEQ ID NO: 3024 - RNA, 20 nt, synthetic construct
  source 1..20: mol_type = other RNA
gccatattactgaccctcta

SEQ ID NO: 3025 - RNA, 20 nt, synthetic construct
  source 1..20: mol_type = other RNA
gccatttccacattggacat

SEQ ID NO: 3026 - RNA, 20 nt, synthetic construct
  source 1..20: mol_type = other RNA
gcccacagtattcagtacag

SEQ ID NO: 3027 - RNA, 20 nt, synthetic construct
  source 1..20: mol_type = other RNA
gcccagggtacattgatgct

SEQ ID NO: 3028 - RNA, 20 nt, synthetic construct
  source 1..20: mol_type = other RNA
gcccagtcacactgttagta

SEQ ID NO: 3029 - RNA, 20 nt, synthetic construct
  source 1..20: mol_type = other RNA
gccccaggtatggccatatt

SEQ ID NO: 3030 - RNA, 20 nt, synthetic construct
  source 1..20: mol_type = other RNA
gccctctctgtagagggtca

SEQ ID NO: 3031 - RNA, 20 nt, synthetic construct
  source 1..20: mol_type = other RNA
gcctactacacgcataggct

SEQ ID NO: 3032 - RNA, 20 nt, synthetic construct
  source 1..20: mol_type = other RNA
gcctatgcgtgtagtaggct

SEQ ID NO: 3033 - RNA, 20 nt, synthetic construct
  source 1..20: mol_type = other RNA
gcctcttagaggttcccagg

SEQ ID NO: 3034 - RNA, 20 nt, synthetic construct
  source 1..20: mol_type = other RNA
gcctgggaacctctaagagg

SEQ ID NO: 3035 - RNA, 20 nt, synthetic construct
  source 1..20: mol_type = other RNA
gcctgttactgtactgaata

SEQ ID NO: 3036 - RNA, 20 nt, synthetic construct
  source 1..20: mol_type = other RNA
gccttgcaggtaatgtgggt

SEQ ID NO: 3037 - RNA, 20 nt, synthetic construct
  source 1..20: mol_type = other RNA
gcctttatcctgcaatacca

SEQ ID NO: 3038 - RNA, 20 nt, synthetic construct
  source 1..20: mol_type = other RNA
gcctttggactccaactaaa

SEQ ID NO: 3039 - RNA, 20 nt, synthetic construct
  source 1..20: mol_type = other RNA
gcgtgtagtaggctacaaca

SEQ ID NO: 3040 - RNA, 20 nt, synthetic construct
  source 1..20: mol_type = other RNA
gctaaaatgttactctgtca

SEQ ID NO: 3041 - RNA, 20 nt, synthetic construct
  source 1..20: mol_type = other RNA
gctacaacacctaggtttgt

SEQ ID NO: 3042 - RNA, 20 nt, synthetic construct
  source 1..20: mol_type = other RNA
gctataccatgtagcctatg

SEQ ID NO: 3043 - RNA, 20 nt, synthetic construct
  source 1..20: mol_type = other RNA
gctccagaagcaagagagag

SEQ ID NO: 3044 - RNA, 20 nt, synthetic construct
  source 1..20: mol_type = other RNA
gctcctagactacaaacctg

SEQ ID NO: 3045 - RNA, 20 nt, synthetic construct
  source 1..20: mol_type = other RNA
gctccttgtagttacatcta

SEQ ID NO: 3046 - RNA, 20 nt, synthetic construct
  source 1..20: mol_type = other RNA
gctctaacatgataaccctc

SEQ ID NO: 3047 - RNA, 20 nt, synthetic construct
  source 1..20: mol_type = other RNA
gctctacaatttactaacag

SEQ ID NO: 3048 - RNA, 20 nt, synthetic construct
  source 1..20: mol_type = other RNA
gctctcccaaatcaattccc

SEQ ID NO: 3049 - RNA, 20 nt, synthetic construct
  source 1..20: mol_type = other RNA
gctctgcagacatcccattc

SEQ ID NO: 3050 - RNA, 20 nt, synthetic construct
  source 1..20: mol_type = other RNA
gctgaaaccccattcaaatc

SEQ ID NO: 3051 - RNA, 20 nt, synthetic construct
  source 1..20: mol_type = other RNA
gctgaggagagaaaatgaac

SEQ ID NO: 3052 - RNA, 20 nt, synthetic construct
  source 1..20: mol_type = other RNA
gctgtataactcctctcttc

SEQ ID NO: 3053 - RNA, 20 nt, synthetic construct
  source 1..20: mol_type = other RNA
gctgtctataaatagtcctc

SEQ ID NO: 3054 - RNA, 20 nt, synthetic construct
  source 1..20: mol_type = other RNA
gcttacacaaacctaggtgt

SEQ ID NO: 3055 - RNA, 20 nt, synthetic construct
  source 1..20: mol_type = other RNA
gcttctggagctccttgtag

SEQ ID NO: 3056 - RNA, 20 nt, synthetic construct
  source 1..20: mol_type = other RNA
gctttgatctttcttctgcc

SEQ ID NO: 3057 - RNA, 20 nt, synthetic construct
  source 1..20: mol_type = other RNA
gcttttcaatgaaattctac

SEQ ID NO: 3058 - RNA, 20 nt, synthetic construct
  source 1..20: mol_type = other RNA
ggaaaagagtggttcatttt

SEQ ID NO: 3059 - RNA, 20 nt, synthetic construct
  source 1..20: mol_type = other RNA
ggaaacagattgttataact

SEQ ID NO: 3060 - RNA, 20 nt, synthetic construct
  source 1..20: mol_type = other RNA
ggaaagaagaatcctacagg

SEQ ID NO: 3061 - RNA, 20 nt, synthetic construct
  source 1..20: mol_type = other RNA
ggaaatggcagaagaaagat

SEQ ID NO: 3062 - RNA, 20 nt, synthetic construct
  source 1..20: mol_type = other RNA
ggaacatgaccctgtaggat

SEQ ID NO: 3063 - RNA, 20 nt, synthetic construct
  source 1..20: mol_type = other RNA
ggaacctctaagaggcaaac

SEQ ID NO: 3064 - RNA, 20 nt, synthetic construct
  source 1..20: mol_type = other RNA
ggaactgccagtatggtatt

SEQ ID NO: 3065 - RNA, 20 nt, synthetic construct
  source 1..20: mol_type = other RNA
ggaacttggacttctctgca

SEQ ID NO: 3066 - RNA, 20 nt, synthetic construct
  source 1..20: mol_type = other RNA
ggaaggtggatgatctgccc

SEQ ID NO: 3067 - RNA, 20 nt, synthetic construct
  source 1..20: mol_type = other RNA
ggaatgggatgtctgcagag

SEQ ID NO: 3068 - RNA, 20 nt, synthetic construct
  source 1..20: mol_type = other RNA
ggaattgatttgggagagca

SEQ ID NO: 3069 - RNA, 20 nt, synthetic construct
  source 1..20: mol_type = other RNA
ggacagtgaaacaaaaacat

SEQ ID NO: 3070 - RNA, 20 nt, synthetic construct
  source 1..20: mol_type = other RNA
ggacatctctgctgaggaga

SEQ ID NO: 3071 - RNA, 20 nt, synthetic construct
  source 1..20: mol_type = other RNA
ggacatgttctgagaaatgc

SEQ ID NO: 3072 - RNA, 20 nt, synthetic construct
  source 1..20: mol_type = other RNA
ggacctgaactctaatatag

SEQ ID NO: 3073 - RNA, 20 nt, synthetic construct
  source 1..20: mol_type = other RNA
ggactatttatagacagctc

SEQ ID NO: 3074 - RNA, 20 nt, synthetic construct
  source 1..20: mol_type = other RNA
ggactccaactaaagatgca

SEQ ID NO: 3075 - RNA, 20 nt, synthetic construct
  source 1..20: mol_type = other RNA
ggactgtgtttgcctcttag

SEQ ID NO: 3076 - RNA, 20 nt, synthetic construct
  source 1..20: mol_type = other RNA
ggacttctctgcatctttag

SEQ ID NO: 3077 - RNA, 20 nt, synthetic construct
  source 1..20: mol_type = other RNA
ggagaacattgacagagtaa

SEQ ID NO: 3078 - RNA, 20 nt, synthetic construct
  source 1..20: mol_type = other RNA
ggagaagggaacatgaccct

SEQ ID NO: 3079 - RNA, 20 nt, synthetic construct
  source 1..20: mol_type = other RNA
ggagagaaaatgaaccactc

SEQ ID NO: 3080 - RNA, 20 nt, synthetic construct
  source 1..20: mol_type = other RNA
ggagagcatcaggaaggtgg

SEQ ID NO: 3081 - RNA, 20 nt, synthetic construct
  source 1..20: mol_type = other RNA
ggagataaagggaaacagat

SEQ ID NO: 3082 - RNA, 20 nt, synthetic construct
  source 1..20: mol_type = other RNA
ggagatttgaatggggtttc

SEQ ID NO: 3083 - RNA, 20 nt, synthetic construct
  source 1..20: mol_type = other RNA
ggagctccagaagcaagaga

SEQ ID NO: 3084 - RNA, 20 nt, synthetic construct
  source 1..20: mol_type = other RNA
ggagctccttgtagttacat

SEQ ID NO: 3085 - RNA, 20 nt, synthetic construct
  source 1..20: mol_type = other RNA
ggaggaacttggacttctct

SEQ ID NO: 3086 - RNA, 20 nt, synthetic construct
  source 1..20: mol_type = other RNA
ggagtccaaaggcttttcaa

SEQ ID NO: 3087 - RNA, 20 nt, synthetic construct
  source 1..20: mol_type = other RNA
ggagtggcatgaagaaggtg

SEQ ID NO: 3088 - RNA, 20 nt, synthetic construct
  source 1..20: mol_type = other RNA
ggagttatacagctctgcag

SEQ ID NO: 3089 - RNA, 20 nt, synthetic construct
  source 1..20: mol_type = other RNA
ggataaaggcaggtggttac

SEQ ID NO: 3090 - RNA, 20 nt, synthetic construct
  source 1..20: mol_type = other RNA
ggatgatctgcccagtcaca

SEQ ID NO: 3091 - RNA, 20 nt, synthetic construct
  source 1..20: mol_type = other RNA
ggatgtctgcagagctgtat

SEQ ID NO: 3092 - RNA, 20 nt, synthetic construct
  source 1..20: mol_type = other RNA
ggattcttctttccctgcta

SEQ ID NO: 3093 - RNA, 20 nt, synthetic construct
  source 1..20: mol_type = other RNA
ggcaaacacagtccccatac

SEQ ID NO: 3094 - RNA, 20 nt, synthetic construct
  source 1..20: mol_type = other RNA
ggcaaaggaactgccagtat

SEQ ID NO: 3095 - RNA, 20 nt, synthetic construct
  source 1..20: mol_type = other RNA
ggcagaagaaagatcaaagc

SEQ ID NO: 3096 - RNA, 20 nt, synthetic construct
  source 1..20: mol_type = other RNA
ggcagatcatccaccttcct

SEQ ID NO: 3097 - RNA, 20 nt, synthetic construct
  source 1..20: mol_type = other RNA
ggcaggtggttacccacatt

SEQ ID NO: 3098 - RNA, 20 nt, synthetic construct
  source 1..20: mol_type = other RNA
ggcagtagaatttcattgaa

SEQ ID NO: 3099 - RNA, 20 nt, synthetic construct
  source 1..20: mol_type = other RNA
ggcagttcctttgccctctc

SEQ ID NO: 3100 - RNA, 20 nt, synthetic construct
  source 1..20: mol_type = other RNA
ggcatgaagaaggtgtatgg

SEQ ID NO: 3101 - RNA, 20 nt, synthetic construct
  source 1..20: mol_type = other RNA
ggccactagaggagataaag

SEQ ID NO: 3102 - RNA, 20 nt, synthetic construct
  source 1..20: mol_type = other RNA
ggccatacaccttcttcatg

SEQ ID NO: 3103 - RNA, 20 nt, synthetic construct
  source 1..20: mol_type = other RNA
ggccatacctggggccatac

SEQ ID NO: 3104 - RNA, 20 nt, synthetic construct
  source 1..20: mol_type = other RNA
ggccatattactgaccctct

SEQ ID NO: 3105 - RNA, 20 nt, synthetic construct
  source 1..20: mol_type = other RNA
ggccccaggtatggccatat

SEQ ID NO: 3106 - RNA, 20 nt, synthetic construct
  source 1..20: mol_type = other RNA
ggcctgggaacctctaagag

SEQ ID NO: 3107 - RNA, 20 nt, synthetic construct
  source 1..20: mol_type = other RNA
ggctacaacacctaggtttg

SEQ ID NO: 3108 - RNA, 20 nt, synthetic construct
  source 1..20: mol_type = other RNA
ggctataccatgtagcctat

SEQ ID NO: 3109 - RNA, 20 nt, synthetic construct
  source 1..20: mol_type = other RNA
ggctctacaatttactaaca

SEQ ID NO: 3110 - RNA, 20 nt, synthetic construct
  source 1..20: mol_type = other RNA
ggctgtacaggtttgtagtc

SEQ ID NO: 3111 - RNA, 20 nt, synthetic construct
  source 1..20: mol_type = other RNA
ggctttgatctttcttctgc

SEQ ID NO: 3112 - RNA, 20 nt, synthetic construct
  source 1..20: mol_type = other RNA
ggcttttcaatgaaattcta

SEQ ID NO: 3113 - RNA, 20 nt, synthetic construct
  source 1..20: mol_type = other RNA
gggaaacagattgttataac

SEQ ID NO: 3114 - RNA, 20 nt, synthetic construct
  source 1..20: mol_type = other RNA
gggaaagaagaatcctacag

SEQ ID NO: 3115 - RNA, 20 nt, synthetic construct
  source 1..20: mol_type = other RNA
gggaacatgaccctgtagga

SEQ ID NO: 3116 - RNA, 20 nt, synthetic construct
  source 1..20: mol_type = other RNA
gggaacctctaagaggcaaa

SEQ ID NO: 3117 - RNA, 20 nt, synthetic construct
  source 1..20: mol_type = other RNA
gggaattgatttgggagagc

SEQ ID NO: 3118 - RNA, 20 nt, synthetic construct
  source 1..20: mol_type = other RNA
gggacatgttctgagaaatg

SEQ ID NO: 3119 - RNA, 20 nt, synthetic construct
  source 1..20: mol_type = other RNA
gggactgtgtttgcctctta

SEQ ID NO: 3120 - RNA, 20 nt, synthetic construct
  source 1..20: mol_type = other RNA
gggagagcatcaggaaggtg

SEQ ID NO: 3121 - RNA, 20 nt, synthetic construct
  source 1..20: mol_type = other RNA
gggaggaacttggacttctc

SEQ ID NO: 3122 - RNA, 20 nt, synthetic construct
  source 1..20: mol_type = other RNA
gggatgtctgcagagctgta

SEQ ID NO: 3123 - RNA, 20 nt, synthetic construct
  source 1..20: mol_type = other RNA
gggcaaaggaactgccagta

SEQ ID NO: 3124 - RNA, 20 nt, synthetic construct
  source 1..20: mol_type = other RNA
gggcagatcatccaccttcc

SEQ ID NO: 3125 - RNA, 20 nt, synthetic construct
  source 1..20: mol_type = other RNA
gggcagtagaatttcattga

SEQ ID NO: 3126 - RNA, 20 nt, synthetic construct
  source 1..20: mol_type = other RNA
gggccatacaccttcttcat

SEQ ID NO: 3127 - RNA, 20 nt, synthetic construct
  source 1..20: mol_type = other RNA
ggggacatgttctgagaaat

SEQ ID NO: 3128 - RNA, 20 nt, synthetic construct
  source 1..20: mol_type = other RNA
ggggactgtgtttgcctctt

SEQ ID NO: 3129 - RNA, 20 nt, synthetic construct
  source 1..20: mol_type = other RNA
ggggccatacaccttcttca

SEQ ID NO: 3130 - RNA, 20 nt, synthetic construct
  source 1..20: mol_type = other RNA
ggggtttcagcatcaatgta

SEQ ID NO: 3131 - RNA, 20 nt, synthetic construct
  source 1..20: mol_type = other RNA
gggtaaccacctgcctttat

SEQ ID NO: 3132 - RNA, 20 nt, synthetic construct
  source 1..20: mol_type = other RNA
gggtacattgatgctgaaac

SEQ ID NO: 3133 - RNA, 20 nt, synthetic construct
  source 1..20: mol_type = other RNA
gggtcagtaatatggccata

SEQ ID NO: 3134 - RNA, 20 nt, synthetic construct
  source 1..20: mol_type = other RNA
gggtcatgttcccttctcct

SEQ ID NO: 3135 - RNA, 20 nt, synthetic construct
  source 1..20: mol_type = other RNA
gggttatcatgttagagctg

SEQ ID NO: 3136 - RNA, 20 nt, synthetic construct
  source 1..20: mol_type = other RNA
gggtttcagcatcaatgtac

SEQ ID NO: 3137 - RNA, 20 nt, synthetic construct
  source 1..20: mol_type = other RNA
ggtaaccacctgcctttatc

SEQ ID NO: 3138 - RNA, 20 nt, synthetic construct
  source 1..20: mol_type = other RNA
ggtaatgtgggtaaccacct

SEQ ID NO: 3139 - RNA, 20 nt, synthetic construct
  source 1..20: mol_type = other RNA
ggtacattgatgctgaaacc

SEQ ID NO: 3140 - RNA, 20 nt, synthetic construct
  source 1..20: mol_type = other RNA
ggtatggccatattactgac

SEQ ID NO: 3141 - RNA, 20 nt, synthetic construct
  source 1..20: mol_type = other RNA
ggtattgcaggataaaggca

SEQ ID NO: 3142 - RNA, 20 nt, synthetic construct
  source 1..20: mol_type = other RNA
ggtcagtaatatggccatac

SEQ ID NO: 3143 - RNA, 20 nt, synthetic construct
  source 1..20: mol_type = other RNA
ggtcatgttcccttctcctg

SEQ ID NO: 3144 - RNA, 20 nt, synthetic construct
  source 1..20: mol_type = other RNA
ggtcctggctctacaattta

SEQ ID NO: 3145 - RNA, 20 nt, synthetic construct
  source 1..20: mol_type = other RNA
ggtggatgatctgcccagtc

SEQ ID NO: 3146 - RNA, 20 nt, synthetic construct
  source 1..20: mol_type = other RNA
ggtggttacccacattacct

SEQ ID NO: 3147 - RNA, 20 nt, synthetic construct
  source 1..20: mol_type = other RNA
ggtgtatggccccaggtatg

SEQ ID NO: 3148 - RNA, 20 nt, synthetic construct
  source 1..20: mol_type = other RNA
ggtgttgtagcctactacac

SEQ ID NO: 3149 - RNA, 20 nt, synthetic construct
  source 1..20: mol_type = other RNA
ggttacccacattacctgca

SEQ ID NO: 3150 - RNA, 20 nt, synthetic construct
  source 1..20: mol_type = other RNA
ggttatcatgttagagctgt

SEQ ID NO: 3151 - RNA, 20 nt, synthetic construct
  source 1..20: mol_type = other RNA
ggttcattttctctcctcag

SEQ ID NO: 3152 - RNA, 20 nt, synthetic construct
  source 1..20: mol_type = other RNA
ggttcccaggccactagagg

SEQ ID NO: 3153 - RNA, 20 nt, synthetic construct
  source 1..20: mol_type = other RNA
ggtttcagcatcaatgtacc

SEQ ID NO: 3154 - RNA, 20 nt, synthetic construct
  source 1..20: mol_type = other RNA
ggtttgtgtaagcatttctc

SEQ ID NO: 3155 - RNA, 20 nt, synthetic construct
  source 1..20: mol_type = other RNA
gtaaattgtagagccaggac

SEQ ID NO: 3156 - RNA, 20 nt, synthetic construct
  source 1..20: mol_type = other RNA
gtaacacatgactatattag

SEQ ID NO: 3157 - RNA, 20 nt, synthetic construct
  source 1..20: mol_type = other RNA
gtaacaggctgtacaggttt

SEQ ID NO: 3158 - RNA, 20 nt, synthetic construct
  source 1..20: mol_type = other RNA
gtaacattttagcagggaaa

SEQ ID NO: 3159 - RNA, 20 nt, synthetic construct
  source 1..20: mol_type = other RNA
gtaaccacctgcctttatcc

SEQ ID NO: 3160 - RNA, 20 nt, synthetic construct
  source 1..20: mol_type = other RNA
gtaactacaaggagctccag

SEQ ID NO: 3161 - RNA, 20 nt, synthetic construct
  source 1..20: mol_type = other RNA
gtaagcatttctcagaacat

SEQ ID NO: 3162 - RNA, 20 nt, synthetic construct
  source 1..20: mol_type = other RNA
gtaagtttttgaccttgaga

SEQ ID NO: 3163 - RNA, 20 nt, synthetic construct
  source 1..20: mol_type = other RNA
gtaatatggccatacctggg

SEQ ID NO: 3164 - RNA, 20 nt, synthetic construct
  source 1..20: mol_type = other RNA
gtaatgtgggtaaccacctg

SEQ ID NO: 3165 - RNA, 20 nt, synthetic construct
  source 1..20: mol_type = other RNA
gtacattgatgctgaaaccc

SEQ ID NO: 3166 - RNA, 20 nt, synthetic construct
  source 1..20: mol_type = other RNA
gtaccctgggcagtagaatt

SEQ ID NO: 3167 - RNA, 20 nt, synthetic construct
  source 1..20: mol_type = other RNA
gtagaatttcattgaaaagc

SEQ ID NO: 3168 - RNA, 20 nt, synthetic construct
  source 1..20: mol_type = other RNA
gtagagccaggacctgaact

SEQ ID NO: 3169 - RNA, 20 nt, synthetic construct
  source 1..20: mol_type = other RNA
gtagagggtcagtaatatgg

SEQ ID NO: 3170 - RNA, 20 nt, synthetic construct
  source 1..20: mol_type = other RNA
gtagcctactacacgcatag

SEQ ID NO: 3171 - RNA, 20 nt, synthetic construct
  source 1..20: mol_type = other RNA
gtagcctatgcgtgtagtag

SEQ ID NO: 3172 - RNA, 20 nt, synthetic construct
  source 1..20: mol_type = other RNA
gtaggattcttctttccctg

SEQ ID NO: 3173 - RNA, 20 nt, synthetic construct
  source 1..20: mol_type = other RNA
gtaggctacaacacctaggt

SEQ ID NO: 3174 - RNA, 20 nt, synthetic construct
  source 1..20: mol_type = other RNA
gtagtaggctacaacaccta

SEQ ID NO: 3175 - RNA, 20 nt, synthetic construct
  source 1..20: mol_type = other RNA
gtagttacatctattatagt

SEQ ID NO: 3176 - RNA, 20 nt, synthetic construct
  source 1..20: mol_type = other RNA
gtataactcctctcttctgt

SEQ ID NO: 3177 - RNA, 20 nt, synthetic construct
  source 1..20: mol_type = other RNA
gtatggccatattactgacc

SEQ ID NO: 3178 - RNA, 20 nt, synthetic construct
  source 1..20: mol_type = other RNA
gtatggccccaggtatggcc

SEQ ID NO: 3179 - RNA, 20 nt, synthetic construct
  source 1..20: mol_type = other RNA
gtatggggactgtgtttgcc

SEQ ID NO: 3180 - RNA, 20 nt, synthetic construct
  source 1..20: mol_type = other RNA
gtatggtattgcaggataaa

SEQ ID NO: 3181 - RNA, 20 nt, synthetic construct
  source 1..20: mol_type = other RNA
gtattgcaggataaaggcag

SEQ ID NO: 3182 - RNA, 20 nt, synthetic construct
  source 1..20: mol_type = other RNA
gtcaatgttctccacatagt

SEQ ID NO: 3183 - RNA, 20 nt, synthetic construct
  source 1..20: mol_type = other RNA
gtcacactgttagtaaattg

SEQ ID NO: 3184 - RNA, 20 nt, synthetic construct
  source 1..20: mol_type = other RNA
gtcagtaatatggccatacc

SEQ ID NO: 3185 - RNA, 20 nt, synthetic construct
  source 1..20: mol_type = other RNA
gtcatgtgttacttaatgac

SEQ ID NO: 3186 - RNA, 20 nt, synthetic construct
  source 1..20: mol_type = other RNA
gtcatgttcccttctcctgt

SEQ ID NO: 3187 - RNA, 20 nt, synthetic construct
  source 1..20: mol_type = other RNA
gtcattaagtaacacatgac

SEQ ID NO: 3188 - RNA, 20 nt, synthetic construct
  source 1..20: mol_type = other RNA
gtccaaaggcttttcaatga

SEQ ID NO: 3189 - RNA, 20 nt, synthetic construct
  source 1..20: mol_type = other RNA
gtccaagttcctccctctct

SEQ ID NO: 3190 - RNA, 20 nt, synthetic construct
  source 1..20: mol_type = other RNA
gtccaatgtggaaatggcag

SEQ ID NO: 3191 - RNA, 20 nt, synthetic construct
  source 1..20: mol_type = other RNA
gtccccatacaggaatggga

SEQ ID NO: 3192 - RNA, 20 nt, synthetic construct
  source 1..20: mol_type = other RNA
gtccccgtcattaagtaaca

SEQ ID NO: 3193 - RNA, 20 nt, synthetic construct
  source 1..20: mol_type = other RNA
gtcctcaggacagtgaaaca

SEQ ID NO: 3194 - RNA, 20 nt, synthetic construct
  source 1..20: mol_type = other RNA
gtcctgaggactatttatag

SEQ ID NO: 3195 - RNA, 20 nt, synthetic construct
  source 1..20: mol_type = other RNA
gtcctggctctacaatttac

SEQ ID NO: 3196 - RNA, 20 nt, synthetic construct
  source 1..20: mol_type = other RNA
gtctaggagcaataggctat

SEQ ID NO: 3197 - RNA, 20 nt, synthetic construct
  source 1..20: mol_type = other RNA
gtctataaatagtcctcagg

SEQ ID NO: 3198 - RNA, 20 nt, synthetic construct
  source 1..20: mol_type = other RNA
gtctgaagaataaaacaaca

SEQ ID NO: 3199 - RNA, 20 nt, synthetic construct
  source 1..20: mol_type = other RNA
gtctgcagagctgtataact

SEQ ID NO: 3200 - RNA, 20 nt, synthetic construct
  source 1..20: mol_type = other RNA
gtgaaacaaaaacattttct

SEQ ID NO: 3201 - RNA, 20 nt, synthetic construct
  source 1..20: mol_type = other RNA
gtgactgggcagatcatcca

SEQ ID NO: 3202 - RNA, 20 nt, synthetic construct
  source 1..20: mol_type = other RNA
gtgagggttatcatgttaga

SEQ ID NO: 3203 - RNA, 20 nt, synthetic construct
  source 1..20: mol_type = other RNA
gtggaaatggcagaagaaag

SEQ ID NO: 3204 - RNA, 20 nt, synthetic construct
  source 1..20: mol_type = other RNA
gtggagaacattgacagagt

SEQ ID NO: 3205 - RNA, 20 nt, synthetic construct
  source 1..20: mol_type = other RNA
gtggagtggcatgaagaagg

SEQ ID NO: 3206 - RNA, 20 nt, synthetic construct
  source 1..20: mol_type = other RNA
gtggatgatctgcccagtca

SEQ ID NO: 3207 - RNA, 20 nt, synthetic construct
  source 1..20: mol_type = other RNA
gtggcatgaagaaggtgtat

SEQ ID NO: 3208 - RNA, 20 nt, synthetic construct
  source 1..20: mol_type = other RNA
gtggcctgggaacctctaag

SEQ ID NO: 3209 - RNA, 20 nt, synthetic construct
  source 1..20: mol_type = other RNA
gtgggtaaccacctgccttt

SEQ ID NO: 3210 - RNA, 20 nt, synthetic construct
  source 1..20: mol_type = other RNA
gtggttacccacattacctg

SEQ ID NO: 3211 - RNA, 20 nt, synthetic construct
  source 1..20: mol_type = other RNA
gtggttcattttctctcctc

SEQ ID NO: 3212 - RNA, 20 nt, synthetic construct
  source 1..20: mol_type = other RNA
gtgtaagcatttctcagaac

SEQ ID NO: 3213 - RNA, 20 nt, synthetic construct
  source 1..20: mol_type = other RNA
gtgtagtaggctacaacacc

SEQ ID NO: 3214 - RNA, 20 nt, synthetic construct
  source 1..20: mol_type = other RNA
gtgtatggccccaggtatgg

SEQ ID NO: 3215 - RNA, 20 nt, synthetic construct
  source 1..20: mol_type = other RNA
gtgtgactgggcagatcatc

SEQ ID NO: 3216 - RNA, 20 nt, synthetic construct
  source 1..20: mol_type = other RNA
gtgttacttaatgacgggga

SEQ ID NO: 3217 - RNA, 20 nt, synthetic construct
  source 1..20: mol_type = other RNA
gtgttgtagcctactacacg

SEQ ID NO: 3218 - RNA, 20 nt, synthetic construct
  source 1..20: mol_type = other RNA
gtgtttgcctcttagaggtt

SEQ ID NO: 3219 - RNA, 20 nt, synthetic construct
  source 1..20: mol_type = other RNA
gttacatctattatagtatc

SEQ ID NO: 3220 - RNA, 20 nt, synthetic construct
  source 1..20: mol_type = other RNA
gttacccacattacctgcaa

SEQ ID NO: 3221 - RNA, 20 nt, synthetic construct
  source 1..20: mol_type = other RNA
gttactctgtcaatgttctc

SEQ ID NO: 3222 - RNA, 20 nt, synthetic construct
  source 1..20: mol_type = other RNA
gttacttaatgacggggaca

SEQ ID NO: 3223 - RNA, 20 nt, synthetic construct
  source 1..20: mol_type = other RNA
gttagagctgtctataaata

SEQ ID NO: 3224 - RNA, 20 nt, synthetic construct
  source 1..20: mol_type = other RNA
gttagtaaattgtagagcca

SEQ ID NO: 3225 - RNA, 20 nt, synthetic construct
  source 1..20: mol_type = other RNA
gttataacaatctgtttccc

SEQ ID NO: 3226 - RNA, 20 nt, synthetic construct
  source 1..20: mol_type = other RNA
gttatacagctctgcagaca

SEQ ID NO: 3227 - RNA, 20 nt, synthetic construct
  source 1..20: mol_type = other RNA
gttatattctagaacaggga

SEQ ID NO: 3228 - RNA, 20 nt, synthetic construct
  source 1..20: mol_type = other RNA
gttatcatgttagagctgtc

SEQ ID NO: 3229 - RNA, 20 nt, synthetic construct
  source 1..20: mol_type = other RNA
gttcaggtcctggctctaca

SEQ ID NO: 3230 - RNA, 20 nt, synthetic construct
  source 1..20: mol_type = other RNA
gttcattttctctcctcagc

SEQ ID NO: 3231 - RNA, 20 nt, synthetic construct
  source 1..20: mol_type = other RNA
gttcccaggccactagagga

SEQ ID NO: 3232 - RNA, 20 nt, synthetic construct
  source 1..20: mol_type = other RNA
gttcccttctcctgtggagt

SEQ ID NO: 3233 - RNA, 20 nt, synthetic construct
  source 1..20: mol_type = other RNA
gttcctccctctctcttgct

SEQ ID NO: 3234 - RNA, 20 nt, synthetic construct
  source 1..20: mol_type = other RNA
gttcctttgccctctctgta

SEQ ID NO: 3235 - RNA, 20 nt, synthetic construct
  source 1..20: mol_type = other RNA
gttctagaatataacaggag

SEQ ID NO: 3236 - RNA, 20 nt, synthetic construct
  source 1..20: mol_type = other RNA
gttctccacatagtgagggt

SEQ ID NO: 3237 - RNA, 20 nt, synthetic construct
  source 1..20: mol_type = other RNA
gttctgagaaatgcttacac

SEQ ID NO: 3238 - RNA, 20 nt, synthetic construct
  source 1..20: mol_type = other RNA
gttggagtccaaaggctttt

SEQ ID NO: 3239 - RNA, 20 nt, synthetic construct
  source 1..20: mol_type = other RNA
gttgtagcctactacacgca

SEQ ID NO: 3240 - RNA, 20 nt, synthetic construct
  source 1..20: mol_type = other RNA
gttgttttattcttcagaca

SEQ ID NO: 3241 - RNA, 20 nt, synthetic construct
  source 1..20: mol_type = other RNA
gtttcactgtcctgaggact

SEQ ID NO: 3242 - RNA, 20 nt, synthetic construct
  source 1..20: mol_type = other RNA
gtttcagcatcaatgtaccc

SEQ ID NO: 3243 - RNA, 20 nt, synthetic construct
  source 1..20: mol_type = other RNA
gtttccctttatctcctcta

SEQ ID NO: 3244 - RNA, 20 nt, synthetic construct
  source 1..20: mol_type = other RNA
gtttgcctcttagaggttcc

SEQ ID NO: 3245 - RNA, 20 nt, synthetic construct
  source 1..20: mol_type = other RNA
gtttgtgtaagcatttctca

SEQ ID NO: 3246 - RNA, 20 nt, synthetic construct
  source 1..20: mol_type = other RNA
gttttattcttcagacagaa

SEQ ID NO: 3247 - RNA, 20 nt, synthetic construct
  source 1..20: mol_type = other RNA
gtttttgaccttgagaaaat

SEQ ID NO: 3248 - RNA, 20 nt, synthetic construct
  source 1..20: mol_type = other RNA
gtttttgtttcactgtcctg

SEQ ID NO: 3249 - RNA, 20 nt, synthetic construct
  source 1..20: mol_type = other RNA
taaaatgttactctgtcaat

SEQ ID NO: 3250 - RNA, 20 nt, synthetic construct
  source 1..20: mol_type = other RNA
taaagatgcagagaagtcca

SEQ ID NO: 3251 - RNA, 20 nt, synthetic construct
  source 1..20: mol_type = other RNA
taaaggcaggtggttaccca

SEQ ID NO: 3252 - RNA, 20 nt, synthetic construct
  source 1..20: mol_type = other RNA
taaagggaaacagattgtta

SEQ ID NO: 3253 - RNA, 20 nt, synthetic construct
  source 1..20: mol_type = other RNA
taaatagtcctcaggacagt

SEQ ID NO: 3254 - RNA, 20 nt, synthetic construct
  source 1..20: mol_type = other RNA
taaattgtagagccaggacc

SEQ ID NO: 3255 - RNA, 20 nt, synthetic construct
  source 1..20: mol_type = other RNA
taacaatctgtttcccttta

SEQ ID NO: 3256 - RNA, 20 nt, synthetic construct
  source 1..20: mol_type = other RNA
taacacatgactatattaga

SEQ ID NO: 3257 - RNA, 20 nt, synthetic construct
  source 1..20: mol_type = other RNA
taacaggagatttgaatggg

SEQ ID NO: 3258 - RNA, 20 nt, synthetic construct
  source 1..20: mol_type = other RNA
taacaggctgtacaggtttg

SEQ ID NO: 3259 - RNA, 20 nt, synthetic construct
  source 1..20: mol_type = other RNA
taacagtgtgactgggcaga

SEQ ID NO: 3260 - RNA, 20 nt, synthetic construct
  source 1..20: mol_type = other RNA
taacatgataaccctcacta

SEQ ID NO: 3261 - RNA, 20 nt, synthetic construct
  source 1..20: mol_type = other RNA
taacattttagcagggaaag

SEQ ID NO: 3262 - RNA, 20 nt, synthetic construct
  source 1..20: mol_type = other RNA
taaccacctgcctttatcct

SEQ ID NO: 3263 - RNA, 20 nt, synthetic construct
  source 1..20: mol_type = other RNA
taaccctcactatgtggaga

SEQ ID NO: 3264 - RNA, 20 nt, synthetic construct
  source 1..20: mol_type = other RNA
taactacaaggagctccaga

SEQ ID NO: 3265 - RNA, 20 nt, synthetic construct
  source 1..20: mol_type = other RNA
taactcctctcttctgtctg

SEQ ID NO: 3266 - RNA, 20 nt, synthetic construct
  source 1..20: mol_type = other RNA
taagaggcaaacacagtccc

SEQ ID NO: 3267 - RNA, 20 nt, synthetic construct
  source 1..20: mol_type = other RNA
taagcatttctcagaacatg

SEQ ID NO: 3268 - RNA, 20 nt, synthetic construct
  source 1..20: mol_type = other RNA
taagtaacacatgactatat

SEQ ID NO: 3269 - RNA, 20 nt, synthetic construct
  source 1..20: mol_type = other RNA
taagtttttgaccttgagaa

SEQ ID NO: 3270 - RNA, 20 nt, synthetic construct
  source 1..20: mol_type = other RNA
taatagatgtaactacaagg

SEQ ID NO: 3271 - RNA, 20 nt, synthetic construct
  source 1..20: mol_type = other RNA
taatatagtcatgtgttact

SEQ ID NO: 3272 - RNA, 20 nt, synthetic construct
  source 1..20: mol_type = other RNA
taatatggccatacctgggg

SEQ ID NO: 3273 - RNA, 20 nt, synthetic construct
  source 1..20: mol_type = other RNA
taatgacggggacatgttct

SEQ ID NO: 3274 - RNA, 20 nt, synthetic construct
  source 1..20: mol_type = other RNA
taatgtgggtaaccacctgc

SEQ ID NO: 3275 - RNA, 20 nt, synthetic construct
  source 1..20: mol_type = other RNA
tacaaaggaaaagagtggtt

SEQ ID NO: 3276 - RNA, 20 nt, synthetic construct
  source 1..20: mol_type = other RNA
tacaacacctaggtttgtgt

SEQ ID NO: 3277 - RNA, 20 nt, synthetic construct
  source 1..20: mol_type = other RNA
tacaaggagctccagaagca

SEQ ID NO: 3278 - RNA, 20 nt, synthetic construct
  source 1..20: mol_type = other RNA
tacaatttactaacagtgtg

SEQ ID NO: 3279 - RNA, 20 nt, synthetic construct
  source 1..20: mol_type = other RNA
tacacaaacctaggtgttgt

SEQ ID NO: 3280 - RNA, 20 nt, synthetic construct
  source 1..20: mol_type = other RNA
tacaccttcttcatgccact

SEQ ID NO: 3281 - RNA, 20 nt, synthetic construct
  source 1..20: mol_type = other RNA
tacacgcataggctacatgg

SEQ ID NO: 3282 - RNA, 20 nt, synthetic construct
  source 1..20: mol_type = other RNA
tacagagagggcaaaggaac

SEQ ID NO: 3283 - RNA, 20 nt, synthetic construct
  source 1..20: mol_type = other RNA
tacagctctgcagacatccc

SEQ ID NO: 3284 - RNA, 20 nt, synthetic construct
  source 1..20: mol_type = other RNA
tacaggaatgggatgtctgc

SEQ ID NO: 3285 - RNA, 20 nt, synthetic construct
  source 1..20: mol_type = other RNA
tacagggtcatgttcccttc

SEQ ID NO: 3286 - RNA, 20 nt, synthetic construct
  source 1..20: mol_type = other RNA
tacatggtatagcctattgc

SEQ ID NO: 3287 - RNA, 20 nt, synthetic construct
  source 1..20: mol_type = other RNA
tacattgatgctgaaacccc

SEQ ID NO: 3288 - RNA, 20 nt, synthetic construct
  source 1..20: mol_type = other RNA
taccatactggcagttcctt

SEQ ID NO: 3289 - RNA, 20 nt, synthetic construct
  source 1..20: mol_type = other RNA
taccatgtagcctatgcgtg

SEQ ID NO: 3290 - RNA, 20 nt, synthetic construct
  source 1..20: mol_type = other RNA
tacccacattacctgcaagg

SEQ ID NO: 3291 - RNA, 20 nt, synthetic construct
  source 1..20: mol_type = other RNA
taccctgggcagtagaattt

SEQ ID NO: 3292 - RNA, 20 nt, synthetic construct
  source 1..20: mol_type = other RNA
tacctgcaaggctttgatct

SEQ ID NO: 3293 - RNA, 20 nt, synthetic construct
  source 1..20: mol_type = other RNA
tacctggggccatacacctt

SEQ ID NO: 3294 - RNA, 20 nt, synthetic construct
  source 1..20: mol_type = other RNA
tactaacagtgtgactgggc

SEQ ID NO: 3295 - RNA, 20 nt, synthetic construct
  source 1..20: mol_type = other RNA
tactacacgcataggctaca

SEQ ID NO: 3296 - RNA, 20 nt, synthetic construct
  source 1..20: mol_type = other RNA
tactctgtcaatgttctcca

SEQ ID NO: 3297 - RNA, 20 nt, synthetic construct
  source 1..20: mol_type = other RNA
tactgaccctctacagagag

SEQ ID NO: 3298 - RNA, 20 nt, synthetic construct
  source 1..20: mol_type = other RNA
tactgcccagggtacattga

SEQ ID NO: 3299 - RNA, 20 nt, synthetic construct
  source 1..20: mol_type = other RNA
tactggcagttcctttgccc

SEQ ID NO: 3300 - RNA, 20 nt, synthetic construct
  source 1..20: mol_type = other RNA
tacttaatgacggggacatg

SEQ ID NO: 3301 - RNA, 20 nt, synthetic construct
  source 1..20: mol_type = other RNA
tagaacagggaattgatttg

SEQ ID NO: 3302 - RNA, 20 nt, synthetic construct
  source 1..20: mol_type = other RNA
tagaatataacaggagattt

SEQ ID NO: 3303 - RNA, 20 nt, synthetic construct
  source 1..20: mol_type = other RNA
tagaatttcattgaaaagcc

SEQ ID NO: 3304 - RNA, 20 nt, synthetic construct
  source 1..20: mol_type = other RNA
tagacagctctaacatgata

SEQ ID NO: 3305 - RNA, 20 nt, synthetic construct
  source 1..20: mol_type = other RNA
tagactacaaacctgtacag

SEQ ID NO: 3306 - RNA, 20 nt, synthetic construct
  source 1..20: mol_type = other RNA
tagagccaggacctgaactc

SEQ ID NO: 3307 - RNA, 20 nt, synthetic construct
  source 1..20: mol_type = other RNA
tagagctgtctataaatagt

SEQ ID NO: 3308 - RNA, 20 nt, synthetic construct
  source 1..20: mol_type = other RNA
tagaggagataaagggaaac

SEQ ID NO: 3309 - RNA, 20 nt, synthetic construct
  source 1..20: mol_type = other RNA
tagagggtcagtaatatggc

SEQ ID NO: 3310 - RNA, 20 nt, synthetic construct
  source 1..20: mol_type = other RNA
tagaggttcccaggccacta

SEQ ID NO: 3311 - RNA, 20 nt, synthetic construct
  source 1..20: mol_type = other RNA
tagagttcaggtcctggctc

SEQ ID NO: 3312 - RNA, 20 nt, synthetic construct
  source 1..20: mol_type = other RNA
tagatgtaactacaaggagc

SEQ ID NO: 3313 - RNA, 20 nt, synthetic construct
  source 1..20: mol_type = other RNA
tagcagggaaagaagaatcc

SEQ ID NO: 3314 - RNA, 20 nt, synthetic construct
  source 1..20: mol_type = other RNA
tagcctactacacgcatagg

SEQ ID NO: 3315 - RNA, 20 nt, synthetic construct
  source 1..20: mol_type = other RNA
tagcctatgcgtgtagtagg

SEQ ID NO: 3316 - RNA, 20 nt, synthetic construct
  source 1..20: mol_type = other RNA
taggattcttctttccctgc

SEQ ID NO: 3317 - RNA, 20 nt, synthetic construct
  source 1..20: mol_type = other RNA
taggctacaacacctaggtt

SEQ ID NO: 3318 - RNA, 20 nt, synthetic construct
  source 1..20: mol_type = other RNA
taggctataccatgtagcct

SEQ ID NO: 3319 - RNA, 20 nt, synthetic construct
  source 1..20: mol_type = other RNA
taggtgttgtagcctactac

SEQ ID NO: 3320 - RNA, 20 nt, synthetic construct
  source 1..20: mol_type = other RNA
taggtttgtgtaagcatttc

SEQ ID NO: 3321 - RNA, 20 nt, synthetic construct
  source 1..20: mol_type = other RNA
tagtaaattgtagagccagg

SEQ ID NO: 3322 - RNA, 20 nt, synthetic construct
  source 1..20: mol_type = other RNA
tagtaggctacaacacctag

SEQ ID NO: 3323 - RNA, 20 nt, synthetic construct
  source 1..20: mol_type = other RNA
tagtcatgtgttacttaatg

SEQ ID NO: 3324 - RNA, 20 nt, synthetic construct
  source 1..20: mol_type = other RNA
tagtcctcaggacagtgaaa

SEQ ID NO: 3325 - RNA, 20 nt, synthetic construct
  source 1..20: mol_type = other RNA
tagtctaggagcaataggct

SEQ ID NO: 3326 - RNA, 20 nt, synthetic construct
  source 1..20: mol_type = other RNA
tagtgagggttatcatgtta

SEQ ID NO: 3327 - RNA, 20 nt, synthetic construct
  source 1..20: mol_type = other RNA
tagtggcctgggaacctcta

SEQ ID NO: 3328 - RNA, 20 nt, synthetic construct
  source 1..20: mol_type = other RNA
tagttggagtccaaaggctt

SEQ ID NO: 3329 - RNA, 20 nt, synthetic construct
  source 1..20: mol_type = other RNA
tataaatagtcctcaggaca

SEQ ID NO: 3330 - RNA, 20 nt, synthetic construct
  source 1..20: mol_type = other RNA
tataacaatctgtttccctt

SEQ ID NO: 3331 - RNA, 20 nt, synthetic construct
  source 1..20: mol_type = other RNA
tataacaggagatttgaatg

SEQ ID NO: 3332 - RNA, 20 nt, synthetic construct
  source 1..20: mol_type = other RNA
tataactcctctcttctgtc

SEQ ID NO: 3333 - RNA, 20 nt, synthetic construct
  source 1..20: mol_type = other RNA
tatacaaaggaaaagagtgg

SEQ ID NO: 3334 - RNA, 20 nt, synthetic construct
  source 1..20: mol_type = other RNA
tatacagctctgcagacatc

SEQ ID NO: 3335 - RNA, 20 nt, synthetic construct
  source 1..20: mol_type = other RNA
tataccatgtagcctatgcg

SEQ ID NO: 3336 - RNA, 20 nt, synthetic construct
  source 1..20: mol_type = other RNA
tatagacagctctaacatga

SEQ ID NO: 3337 - RNA, 20 nt, synthetic construct
  source 1..20: mol_type = other RNA
tatagtcatgtgttacttaa

SEQ ID NO: 3338 - RNA, 20 nt, synthetic construct
  source 1..20: mol_type = other RNA
tatattagagttcaggtcct

SEQ ID NO: 3339 - RNA, 20 nt, synthetic construct
  source 1..20: mol_type = other RNA
tatattctagaacagggaat

SEQ ID NO: 3340 - RNA, 20 nt, synthetic construct
  source 1..20: mol_type = other RNA
tatcaagttataacaatctg

SEQ ID NO: 3341 - RNA, 20 nt, synthetic construct
  source 1..20: mol_type = other RNA
tatcatgttagagctgtcta

SEQ ID NO: 3342 - RNA, 20 nt, synthetic construct
  source 1..20: mol_type = other RNA
tatcctgcaataccatactg

SEQ ID NO: 3343 - RNA, 20 nt, synthetic construct
  source 1..20: mol_type = other RNA
tatctcctctagtggcctgg

SEQ ID NO: 3344 - RNA, 20 nt, synthetic construct
  source 1..20: mol_type = other RNA
tatgcgtgtagtaggctaca

SEQ ID NO: 3345 - RNA, 20 nt, synthetic construct
  source 1..20: mol_type = other RNA
tatggccatacctggggcca

SEQ ID NO: 3346 - RNA, 20 nt, synthetic construct
  source 1..20: mol_type = other RNA
tatggccatattactgaccc

SEQ ID NO: 3347 - RNA, 20 nt, synthetic construct
  source 1..20: mol_type = other RNA
tatggccccaggtatggcca

SEQ ID NO: 3348 - RNA, 20 nt, synthetic construct
  source 1..20: mol_type = other RNA
tatggggactgtgtttgcct

SEQ ID NO: 3349 - RNA, 20 nt, synthetic construct
  source 1..20: mol_type = other RNA
tatggtattgcaggataaag

SEQ ID NO: 3350 - RNA, 20 nt, synthetic construct
  source 1..20: mol_type = other RNA
tatgtggagaacattgacag

SEQ ID NO: 3351 - RNA, 20 nt, synthetic construct
  source 1..20: mol_type = other RNA
tattactgaccctctacaga

SEQ ID NO: 3352 - RNA, 20 nt, synthetic construct
  source 1..20: mol_type = other RNA
tattagagttcaggtcctgg

SEQ ID NO: 3353 - RNA, 20 nt, synthetic construct
  source 1..20: mol_type = other RNA
tattctagaacagggaattg

SEQ ID NO: 3354 - RNA, 20 nt, synthetic construct
  source 1..20: mol_type = other RNA
tattcttcagacagaagaga

SEQ ID NO: 3355 - RNA, 20 nt, synthetic construct
  source 1..20: mol_type = other RNA
tattgcaggataaaggcagg

SEQ ID NO: 3356 - RNA, 20 nt, synthetic construct
  source 1..20: mol_type = other RNA
tatttatagacagctctaac

SEQ ID NO: 3357 - RNA, 20 nt, synthetic construct
  source 1..20: mol_type = other RNA
tcaaagccttgcaggtaatg

SEQ ID NO: 3358 - RNA, 20 nt, synthetic construct
  source 1..20: mol_type = other RNA
tcaaatctcctgttatattc

SEQ ID NO: 3359 - RNA, 20 nt, synthetic construct
  source 1..20: mol_type = other RNA
tcaagttataacaatctgtt

SEQ ID NO: 3360 - RNA, 20 nt, synthetic construct
  source 1..20: mol_type = other RNA
tcaatgaaattctactgccc

SEQ ID NO: 3361 - RNA, 20 nt, synthetic construct
  source 1..20: mol_type = other RNA
tcaatgtaccctgggcagta

SEQ ID NO: 3362 - RNA, 20 nt, synthetic construct
  source 1..20: mol_type = other RNA
tcaatgttctccacatagtg

SEQ ID NO: 3363 - RNA, 20 nt, synthetic construct
  source 1..20: mol_type = other RNA
tcaattccctgttctagaat

SEQ ID NO: 3364 - RNA, 20 nt, synthetic construct
  source 1..20: mol_type = other RNA
tcacactgttagtaaattgt

SEQ ID NO: 3365 - RNA, 20 nt, synthetic construct
  source 1..20: mol_type = other RNA
tcactatgtggagaacattg

SEQ ID NO: 3366 - RNA, 20 nt, synthetic construct
  source 1..20: mol_type = other RNA
tcactgtcctgaggactatt

SEQ ID NO: 3367 - RNA, 20 nt, synthetic construct
  source 1..20: mol_type = other RNA
tcagaacatgtccccgtcat

SEQ ID NO: 3368 - RNA, 20 nt, synthetic construct
  source 1..20: mol_type = other RNA
tcagacagaagagaggagtt

SEQ ID NO: 3369 - RNA, 20 nt, synthetic construct
  source 1..20: mol_type = other RNA
tcagcagagatgtccaatgt

SEQ ID NO: 3370 - RNA, 20 nt, synthetic construct
  source 1..20: mol_type = other RNA
tcagcatcaatgtaccctgg

SEQ ID NO: 3371 - RNA, 20 nt, synthetic construct
  source 1..20: mol_type = other RNA
tcaggaaggtggatgatctg

SEQ ID NO: 3372 - RNA, 20 nt, synthetic construct
  source 1..20: mol_type = other RNA
tcaggacagtgaaacaaaaa

SEQ ID NO: 3373 - RNA, 20 nt, synthetic construct
  source 1..20: mol_type = other RNA
tcaggtcctggctctacaat

SEQ ID NO: 3374 - RNA, 20 nt, synthetic construct
  source 1..20: mol_type = other RNA
tcagtaatatggccatacct

SEQ ID NO: 3375 - RNA, 20 nt, synthetic construct
  source 1..20: mol_type = other RNA
tcatccaccttcctgatgct

SEQ ID NO: 3376 - RNA, 20 nt, synthetic construct
  source 1..20: mol_type = other RNA
tcatgccactccacaggaga

SEQ ID NO: 3377 - RNA, 20 nt, synthetic construct
  source 1..20: mol_type = other RNA
tcatgtgttacttaatgacg

SEQ ID NO: 3378 - RNA, 20 nt, synthetic construct
  source 1..20: mol_type = other RNA
tcatgttagagctgtctata

SEQ ID NO: 3379 - RNA, 20 nt, synthetic construct
  source 1..20: mol_type = other RNA
tcatgttcccttctcctgtg

SEQ ID NO: 3380 - RNA, 20 nt, synthetic construct
  source 1..20: mol_type = other RNA
tcattaagtaacacatgact

SEQ ID NO: 3381 - RNA, 20 nt, synthetic construct
  source 1..20: mol_type = other RNA
tcattgaaaagcctttggac

SEQ ID NO: 3382 - RNA, 20 nt, synthetic construct
  source 1..20: mol_type = other RNA
tcattttctctcctcagcag

SEQ ID NO: 3383 - RNA, 20 nt, synthetic construct
  source 1..20: mol_type = other RNA
tccaaaggcttttcaatgaa

SEQ ID NO: 3384 - RNA, 20 nt, synthetic construct
  source 1..20: mol_type = other RNA
tccaactaaagatgcagaga

SEQ ID NO: 3385 - RNA, 20 nt, synthetic construct
  source 1..20: mol_type = other RNA
tccaagttcctccctctctc

SEQ ID NO: 3386 - RNA, 20 nt, synthetic construct
  source 1..20: mol_type = other RNA
tccaatgtggaaatggcaga

SEQ ID NO: 3387 - RNA, 20 nt, synthetic construct
  source 1..20: mol_type = other RNA
tccacaggagaagggaacat

SEQ ID NO: 3388 - RNA, 20 nt, synthetic construct
  source 1..20: mol_type = other RNA
tccacatagtgagggttatc

SEQ ID NO: 3389 - RNA, 20 nt, synthetic construct
  source 1..20: mol_type = other RNA
tccacattggacatctctgc

SEQ ID NO: 3390 - RNA, 20 nt, synthetic construct
  source 1..20: mol_type = other RNA
tccaccttcctgatgctctc

SEQ ID NO: 3391 - RNA, 20 nt, synthetic construct
  source 1..20: mol_type = other RNA
tccagaagcaagagagaggg

SEQ ID NO: 3392 - RNA, 20 nt, synthetic construct
  source 1..20: mol_type = other RNA
tcccaaatcaattccctgtt

SEQ ID NO: 3393 - RNA, 20 nt, synthetic construct
  source 1..20: mol_type = other RNA
tcccaggccactagaggaga

SEQ ID NO: 3394 - RNA, 20 nt, synthetic construct
  source 1..20: mol_type = other RNA
tcccattcctgtatggggac

SEQ ID NO: 3395 - RNA, 20 nt, synthetic construct
  source 1..20: mol_type = other RNA
tccccatacaggaatgggat

SEQ ID NO: 3396 - RNA, 20 nt, synthetic construct
  source 1..20: mol_type = other RNA
tccccgtcattaagtaacac

SEQ ID NO: 3397 - RNA, 20 nt, synthetic construct
  source 1..20: mol_type = other RNA
tccctctctcttgcttctgg

SEQ ID NO: 3398 - RNA, 20 nt, synthetic construct
  source 1..20: mol_type = other RNA
tccctgctaaaatgttactc

SEQ ID NO: 3399 - RNA, 20 nt, synthetic construct
  source 1..20: mol_type = other RNA
tccctgttctagaatataac

SEQ ID NO: 3400 - RNA, 20 nt, synthetic construct
  source 1..20: mol_type = other RNA
tcccttctcctgtggagtgg

SEQ ID NO: 3401 - RNA, 20 nt, synthetic construct
  source 1..20: mol_type = other RNA
tccctttatctcctctagtg

SEQ ID NO: 3402 - RNA, 20 nt, synthetic construct
  source 1..20: mol_type = other RNA
tcctacagggtcatgttccc

SEQ ID NO: 3403 - RNA, 20 nt, synthetic construct
  source 1..20: mol_type = other RNA
tcctagactacaaacctgta

SEQ ID NO: 3404 - RNA, 20 nt, synthetic construct
  source 1..20: mol_type = other RNA
tcctcagcagagatgtccaa

SEQ ID NO: 3405 - RNA, 20 nt, synthetic construct
  source 1..20: mol_type = other RNA
tcctcaggacagtgaaacaa

SEQ ID NO: 3406 - RNA, 20 nt, synthetic construct
  source 1..20: mol_type = other RNA
tcctccctctctcttgcttc

SEQ ID NO: 3407 - RNA, 20 nt, synthetic construct
  source 1..20: mol_type = other RNA
tcctctagtggcctgggaac

SEQ ID NO: 3408 - RNA, 20 nt, synthetic construct
  source 1..20: mol_type = other RNA
tcctctcttctgtctgaaga

SEQ ID NO: 3409 - RNA, 20 nt, synthetic construct
  source 1..20: mol_type = other RNA
tcctgaggactatttataga

SEQ ID NO: 3410 - RNA, 20 nt, synthetic construct
  source 1..20: mol_type = other RNA
tcctgatgctctcccaaatc

SEQ ID NO: 3411 - RNA, 20 nt, synthetic construct
  source 1..20: mol_type = other RNA
tcctgcaataccatactggc

SEQ ID NO: 3412 - RNA, 20 nt, synthetic construct
  source 1..20: mol_type = other RNA
tcctggctctacaatttact

SEQ ID NO: 3413 - RNA, 20 nt, synthetic construct
  source 1..20: mol_type = other RNA
tcctgtatggggactgtgtt

SEQ ID NO: 3414 - RNA, 20 nt, synthetic construct
  source 1..20: mol_type = other RNA
tcctgtggagtggcatgaag

SEQ ID NO: 3415 - RNA, 20 nt, synthetic construct
  source 1..20: mol_type = other RNA
tcctgttatattctagaaca

SEQ ID NO: 3416 - RNA, 20 nt, synthetic construct
  source 1..20: mol_type = other RNA
tccttgtagttacatctatt

SEQ ID NO: 3417 - RNA, 20 nt, synthetic construct
  source 1..20: mol_type = other RNA
tcctttgccctctctgtaga

SEQ ID NO: 3418 - RNA, 20 nt, synthetic construct
  source 1..20: mol_type = other RNA
tcctttgtataatgttgttt

SEQ ID NO: 3419 - RNA, 20 nt, synthetic construct
  source 1..20: mol_type = other RNA
tctaacatgataaccctcac

SEQ ID NO: 3420 - RNA, 20 nt, synthetic construct
  source 1..20: mol_type = other RNA
tctaagaggcaaacacagtc

SEQ ID NO: 3421 - RNA, 20 nt, synthetic construct
  source 1..20: mol_type = other RNA
tctaatatagtcatgtgtta

SEQ ID NO: 3422 - RNA, 20 nt, synthetic construct
  source 1..20: mol_type = other RNA
tctacaatttactaacagtg

SEQ ID NO: 3423 - RNA, 20 nt, synthetic construct
  source 1..20: mol_type = other RNA
tctacagagagggcaaagga

SEQ ID NO: 3424 - RNA, 20 nt, synthetic construct
  source 1..20: mol_type = other RNA
tctactgcccagggtacatt

SEQ ID NO: 3425 - RNA, 20 nt, synthetic construct
  source 1..20: mol_type = other RNA
tctagaacagggaattgatt

SEQ ID NO: 3426 - RNA, 20 nt, synthetic construct
  source 1..20: mol_type = other RNA
tctagaatataacaggagat

SEQ ID NO: 3427 - RNA, 20 nt, synthetic construct
  source 1..20: mol_type = other RNA
tctaggagcaataggctata

SEQ ID NO: 3428 - RNA, 20 nt, synthetic construct
  source 1..20: mol_type = other RNA
tctagtggcctgggaacctc

SEQ ID NO: 3429 - RNA, 20 nt, synthetic construct
  source 1..20: mol_type = other RNA
tctataaatagtcctcagga

SEQ ID NO: 3430 - RNA, 20 nt, synthetic construct
  source 1..20: mol_type = other RNA
tctcagaacatgtccccgtc

SEQ ID NO: 3431 - RNA, 20 nt, synthetic construct
  source 1..20: mol_type = other RNA
tctccacatagtgagggtta

SEQ ID NO: 3432 - RNA, 20 nt, synthetic construct
  source 1..20: mol_type = other RNA
tctcccaaatcaattccctg

SEQ ID NO: 3433 - RNA, 20 nt, synthetic construct
  source 1..20: mol_type = other RNA
tctcctcagcagagatgtcc

SEQ ID NO: 3434 - RNA, 20 nt, synthetic construct
  source 1..20: mol_type = other RNA
tctcctctagtggcctggga

SEQ ID NO: 3435 - RNA, 20 nt, synthetic construct
  source 1..20: mol_type = other RNA
tctcctgtggagtggcatga

SEQ ID NO: 3436 - RNA, 20 nt, synthetic construct
  source 1..20: mol_type = other RNA
tctcctgttatattctagaa

SEQ ID NO: 3437 - RNA, 20 nt, synthetic construct
  source 1..20: mol_type = other RNA
tctctcctcagcagagatgt

SEQ ID NO: 3438 - RNA, 20 nt, synthetic construct
  source 1..20: mol_type = other RNA
tctctcttgcttctggagct

SEQ ID NO: 3439 - RNA, 20 nt, synthetic construct
  source 1..20: mol_type = other RNA
tctctgcatctttagttgga

SEQ ID NO: 3440 - RNA, 20 nt, synthetic construct
  source 1..20: mol_type = other RNA
tctctgctgaggagagaaaa

SEQ ID NO: 3441 - RNA, 20 nt, synthetic construct
  source 1..20: mol_type = other RNA
tctctgtagagggtcagtaa

SEQ ID NO: 3442 - RNA, 20 nt, synthetic construct
  source 1..20: mol_type = other RNA
tctcttctgtctgaagaata

SEQ ID NO: 3443 - RNA, 20 nt, synthetic construct
  source 1..20: mol_type = other RNA
tctcttgcttctggagctcc

SEQ ID NO: 3444 - RNA, 20 nt, synthetic construct
  source 1..20: mol_type = other RNA
tctgaagaataaaacaacat

SEQ ID NO: 3445 - RNA, 20 nt, synthetic construct
  source 1..20: mol_type = other RNA
tctgagaaatgcttacacaa

SEQ ID NO: 3446 - RNA, 20 nt, synthetic construct
  source 1..20: mol_type = other RNA
tctgcagacatcccattcct

SEQ ID NO: 3447 - RNA, 20 nt, synthetic construct
  source 1..20: mol_type = other RNA
tctgcagagctgtataactc

SEQ ID NO: 3448 - RNA, 20 nt, synthetic construct
  source 1..20: mol_type = other RNA
tctgcatctttagttggagt

SEQ ID NO: 3449 - RNA, 20 nt, synthetic construct
  source 1..20: mol_type = other RNA
tctgccatttccacattgga

SEQ ID NO: 3450 - RNA, 20 nt, synthetic construct
  source 1..20: mol_type = other RNA
tctgcccagtcacactgtta

SEQ ID NO: 3451 - RNA, 20 nt, synthetic construct
  source 1..20: mol_type = other RNA
tctgctgaggagagaaaatg

SEQ ID NO: 3452 - RNA, 20 nt, synthetic construct
  source 1..20: mol_type = other RNA
tctggagctccttgtagtta

SEQ ID NO: 3453 - RNA, 20 nt, synthetic construct
  source 1..20: mol_type = other RNA
tctgtagagggtcagtaata

SEQ ID NO: 3454 - RNA, 20 nt, synthetic construct
  source 1..20: mol_type = other RNA
tctgtcaatgttctccacat

SEQ ID NO: 3455 - RNA, 20 nt, synthetic construct
  source 1..20: mol_type = other RNA
tctgtctgaagaataaaaca

SEQ ID NO: 3456 - RNA, 20 nt, synthetic construct
  source 1..20: mol_type = other RNA
tctgtttccctttatctcct

SEQ ID NO: 3457 - RNA, 20 nt, synthetic construct
  source 1..20: mol_type = other RNA
tcttagaggttcccaggcca

SEQ ID NO: 3458 - RNA, 20 nt, synthetic construct
  source 1..20: mol_type = other RNA
tcttcagacagaagagagga

SEQ ID NO: 3459 - RNA, 20 nt, synthetic construct
  source 1..20: mol_type = other RNA
tcttcatgccactccacagg

SEQ ID NO: 3460 - RNA, 20 nt, synthetic construct
  source 1..20: mol_type = other RNA
tcttctgccatttccacatt

SEQ ID NO: 3461 - RNA, 20 nt, synthetic construct
  source 1..20: mol_type = other RNA
tcttctgtctgaagaataaa

SEQ ID NO: 3462 - RNA, 20 nt, synthetic construct
  source 1..20: mol_type = other RNA
tcttctttccctgctaaaat

SEQ ID NO: 3463 - RNA, 20 nt, synthetic construct
  source 1..20: mol_type = other RNA
tcttgcttctggagctcctt

SEQ ID NO: 3464 - RNA, 20 nt, synthetic construct
  source 1..20: mol_type = other RNA
tctttagttggagtccaaag

SEQ ID NO: 3465 - RNA, 20 nt, synthetic construct
  source 1..20: mol_type = other RNA
tctttccctgctaaaatgtt

SEQ ID NO: 3466 - RNA, 20 nt, synthetic construct
  source 1..20: mol_type = other RNA
tctttcttctgccatttcca

SEQ ID NO: 3467 - RNA, 20 nt, synthetic construct
  source 1..20: mol_type = other RNA
tcttttcctttgtataatgt

SEQ ID NO: 3468 - RNA, 20 nt, synthetic construct
  source 1..20: mol_type = other RNA
tgaaaagcctttggactcca

SEQ ID NO: 3469 - RNA, 20 nt, synthetic construct
  source 1..20: mol_type = other RNA
tgaaacaaaaacattttctc

SEQ ID NO: 3470 - RNA, 20 nt, synthetic construct
  source 1..20: mol_type = other RNA
tgaaaccccattcaaatctc

SEQ ID NO: 3471 - RNA, 20 nt, synthetic construct
  source 1..20: mol_type = other RNA
tgaaattctactgcccaggg

SEQ ID NO: 3472 - RNA, 20 nt, synthetic construct
  source 1..20: mol_type = other RNA
tgaaccactcttttcctttg

SEQ ID NO: 3473 - RNA, 20 nt, synthetic construct
  source 1..20: mol_type = other RNA
tgaactctaatatagtcatg

SEQ ID NO: 3474 - RNA, 20 nt, synthetic construct
  source 1..20: mol_type = other RNA
tgaagaaggtgtatggcccc

SEQ ID NO: 3475 - RNA, 20 nt, synthetic construct
  source 1..20: mol_type = other RNA
tgaatggggtttcagcatca

SEQ ID NO: 3476 - RNA, 20 nt, synthetic construct
  source 1..20: mol_type = other RNA
tgacagagtaacattttagc

SEQ ID NO: 3477 - RNA, 20 nt, synthetic construct
  source 1..20: mol_type = other RNA
tgaccctctacagagagggc

SEQ ID NO: 3478 - RNA, 20 nt, synthetic construct
  source 1..20: mol_type = other RNA
tgaccctgtaggattcttct

SEQ ID NO: 3479 - RNA, 20 nt, synthetic construct
  source 1..20: mol_type = other RNA
tgaccttgagaaaatgtttt

SEQ ID NO: 3480 - RNA, 20 nt, synthetic construct
  source 1..20: mol_type = other RNA
tgacggggacatgttctgag

SEQ ID NO: 3481 - RNA, 20 nt, synthetic construct
  source 1..20: mol_type = other RNA
tgactatattagagttcagg

SEQ ID NO: 3482 - RNA, 20 nt, synthetic construct
  source 1..20: mol_type = other RNA
tgactgggcagatcatccac

SEQ ID NO: 3483 - RNA, 20 nt, synthetic construct
  source 1..20: mol_type = other RNA
tgagaaaatgtttttgtttc

SEQ ID NO: 3484 - RNA, 20 nt, synthetic construct
  source 1..20: mol_type = other RNA
tgagaaatgcttacacaaac

SEQ ID NO: 3485 - RNA, 20 nt, synthetic construct
  source 1..20: mol_type = other RNA
tgaggactatttatagacag

SEQ ID NO: 3486 - RNA, 20 nt, synthetic construct
  source 1..20: mol_type = other RNA
tgaggagagaaaatgaacca

SEQ ID NO: 3487 - RNA, 20 nt, synthetic construct
  source 1..20: mol_type = other RNA
tgagggttatcatgttagag

SEQ ID NO: 3488 - RNA, 20 nt, synthetic construct
  source 1..20: mol_type = other RNA
tgataaccctcactatgtgg

SEQ ID NO: 3489 - RNA, 20 nt, synthetic construct
  source 1..20: mol_type = other RNA
tgatctgcccagtcacactg

SEQ ID NO: 3490 - RNA, 20 nt, synthetic construct
  source 1..20: mol_type = other RNA
tgatctttcttctgccattt

SEQ ID NO: 3491 - RNA, 20 nt, synthetic construct
  source 1..20: mol_type = other RNA
tgatgctctcccaaatcaat

SEQ ID NO: 3492 - RNA, 20 nt, synthetic construct
  source 1..20: mol_type = other RNA
tgatgctgaaaccccattca

SEQ ID NO: 3493 - RNA, 20 nt, synthetic construct
  source 1..20: mol_type = other RNA
tgatttgggagagcatcagg

SEQ ID NO: 3494 - RNA, 20 nt, synthetic construct
  source 1..20: mol_type = other RNA
tgcaaggctttgatctttct

SEQ ID NO: 3495 - RNA, 20 nt, synthetic construct
  source 1..20: mol_type = other RNA
tgcaataccatactggcagt

SEQ ID NO: 3496 - RNA, 20 nt, synthetic construct
  source 1..20: mol_type = other RNA
tgcagacatcccattcctgt

SEQ ID NO: 3497 - RNA, 20 nt, synthetic construct
  source 1..20: mol_type = other RNA
tgcagagaagtccaagttcc

SEQ ID NO: 3498 - RNA, 20 nt, synthetic construct
  source 1..20: mol_type = other RNA
tgcagagctgtataactcct

SEQ ID NO: 3499 - RNA, 20 nt, synthetic construct
  source 1..20: mol_type = other RNA
tgcaggataaaggcaggtgg

SEQ ID NO: 3500 - RNA, 20 nt, synthetic construct
  source 1..20: mol_type = other RNA
tgcaggtaatgtgggtaacc

SEQ ID NO: 3501 - RNA, 20 nt, synthetic construct
  source 1..20: mol_type = other RNA
tgcatctttagttggagtcc

SEQ ID NO: 3502 - RNA, 20 nt, synthetic construct
  source 1..20: mol_type = other RNA
tgccactccacaggagaagg

SEQ ID NO: 3503 - RNA, 20 nt, synthetic construct
  source 1..20: mol_type = other RNA
tgccagtatggtattgcagg

SEQ ID NO: 3504 - RNA, 20 nt, synthetic construct
  source 1..20: mol_type = other RNA
tgccatttccacattggaca

SEQ ID NO: 3505 - RNA, 20 nt, synthetic construct
  source 1..20: mol_type = other RNA
tgcccacagtattcagtaca

SEQ ID NO: 3506 - RNA, 20 nt, synthetic construct
  source 1..20: mol_type = other RNA
tgcccagggtacattgatgc

SEQ ID NO: 3507 - RNA, 20 nt, synthetic construct
  source 1..20: mol_type = other RNA
tgcccagtcacactgttagt

SEQ ID NO: 3508 - RNA, 20 nt, synthetic construct
  source 1..20: mol_type = other RNA
tgccctctctgtagagggtc

SEQ ID NO: 3509 - RNA, 20 nt, synthetic construct
  source 1..20: mol_type = other RNA
tgcctcttagaggttcccag

SEQ ID NO: 3510 - RNA, 20 nt, synthetic construct
  source 1..20: mol_type = other RNA
tgcctttatcctgcaatacc

SEQ ID NO: 3511 - RNA, 20 nt, synthetic construct
  source 1..20: mol_type = other RNA
tgcgtgtagtaggctacaac

SEQ ID NO: 3512 - RNA, 20 nt, synthetic construct
  source 1..20: mol_type = other RNA
tgctaaaatgttactctgtc

SEQ ID NO: 3513 - RNA, 20 nt, synthetic construct
  source 1..20: mol_type = other RNA
tgctcctagactacaaacct

SEQ ID NO: 3514 - RNA, 20 nt, synthetic construct
  source 1..20: mol_type = other RNA
tgctctcccaaatcaattcc

SEQ ID NO: 3515 - RNA, 20 nt, synthetic construct
  source 1..20: mol_type = other RNA
tgctgaaaccccattcaaat

SEQ ID NO: 3516 - RNA, 20 nt, synthetic construct
  source 1..20: mol_type = other RNA
tgctgaggagagaaaatgaa

SEQ ID NO: 3517 - RNA, 20 nt, synthetic construct
  source 1..20: mol_type = other RNA
tgcttacacaaacctaggtg

SEQ ID NO: 3518 - RNA, 20 nt, synthetic construct
  source 1..20: mol_type = other RNA
tgcttctggagctccttgta

SEQ ID NO: 3519 - RNA, 20 nt, synthetic construct
  source 1..20: mol_type = other RNA
tggaaatggcagaagaaaga

SEQ ID NO: 3520 - RNA, 20 nt, synthetic construct
  source 1..20: mol_type = other RNA
tggacatctctgctgaggag

SEQ ID NO: 3521 - RNA, 20 nt, synthetic construct
  source 1..20: mol_type = other RNA
tggactccaactaaagatgc

SEQ ID NO: 3522 - RNA, 20 nt, synthetic construct
  source 1..20: mol_type = other RNA
tggacttctctgcatcttta

SEQ ID NO: 3523 - RNA, 20 nt, synthetic construct
  source 1..20: mol_type = other RNA
tggagaacattgacagagta

SEQ ID NO: 3524 - RNA, 20 nt, synthetic construct
  source 1..20: mol_type = other RNA
tggagctccttgtagttaca

SEQ ID NO: 3525 - RNA, 20 nt, synthetic construct
  source 1..20: mol_type = other RNA
tggagtccaaaggcttttca

SEQ ID NO: 3526 - RNA, 20 nt, synthetic construct
  source 1..20: mol_type = other RNA
tggagtggcatgaagaaggt

SEQ ID NO: 3527 - RNA, 20 nt, synthetic construct
  source 1..20: mol_type = other RNA
tggatgatctgcccagtcac

SEQ ID NO: 3528 - RNA, 20 nt, synthetic construct
  source 1..20: mol_type = other RNA
tggcagaagaaagatcaaag

SEQ ID NO: 3529 - RNA, 20 nt, synthetic construct
  source 1..20: mol_type = other RNA
tggcagttcctttgccctct

SEQ ID NO: 3530 - RNA, 20 nt, synthetic construct
  source 1..20: mol_type = other RNA
tggcatgaagaaggtgtatg

SEQ ID NO: 3531 - RNA, 20 nt, synthetic construct
  source 1..20: mol_type = other RNA
tggccatacctggggccata

SEQ ID NO: 3532 - RNA, 20 nt, synthetic construct
  source 1..20: mol_type = other RNA
tggccatattactgaccctc

SEQ ID NO: 3533 - RNA, 20 nt, synthetic construct
  source 1..20: mol_type = other RNA
tggccccaggtatggccata

SEQ ID NO: 3534 - RNA, 20 nt, synthetic construct
  source 1..20: mol_type = other RNA
tggcctgggaacctctaaga

SEQ ID NO: 3535 - RNA, 20 nt, synthetic construct
  source 1..20: mol_type = other RNA
tggctctacaatttactaac

SEQ ID NO: 3536 - RNA, 20 nt, synthetic construct
  source 1..20: mol_type = other RNA
tgggaacctctaagaggcaa

SEQ ID NO: 3537 - RNA, 20 nt, synthetic construct
  source 1..20: mol_type = other RNA
tgggagagcatcaggaaggt

SEQ ID NO: 3538 - RNA, 20 nt, synthetic construct
  source 1..20: mol_type = other RNA
tgggatgtctgcagagctgt

SEQ ID NO: 3539 - RNA, 20 nt, synthetic construct
  source 1..20: mol_type = other RNA
tgggcagatcatccaccttc

SEQ ID NO: 3540 - RNA, 20 nt, synthetic construct
  source 1..20: mol_type = other RNA
tgggcagtagaatttcattg

SEQ ID NO: 3541 - RNA, 20 nt, synthetic construct
  source 1..20: mol_type = other RNA
tggggactgtgtttgcctct

SEQ ID NO: 3542 - RNA, 20 nt, synthetic construct
  source 1..20: mol_type = other RNA
tggggccatacaccttcttc

SEQ ID NO: 3543 - RNA, 20 nt, synthetic construct
  source 1..20: mol_type = other RNA
tggggtttcagcatcaatgt

SEQ ID NO: 3544 - RNA, 20 nt, synthetic construct
  source 1..20: mol_type = other RNA
tgggtaaccacctgccttta

SEQ ID NO: 3545 - RNA, 20 nt, synthetic construct
  source 1..20: mol_type = other RNA
tggtattgcaggataaaggc

SEQ ID NO: 3546 - RNA, 20 nt, synthetic construct
  source 1..20: mol_type = other RNA
tggttacccacattacctgc

SEQ ID NO: 3547 - RNA, 20 nt, synthetic construct
  source 1..20: mol_type = other RNA
tggttcattttctctcctca

SEQ ID NO: 3548 - RNA, 20 nt, synthetic construct
  source 1..20: mol_type = other RNA
tgtaactacaaggagctcca

SEQ ID NO: 3549 - RNA, 20 nt, synthetic construct
  source 1..20: mol_type = other RNA
tgtaagcatttctcagaaca

SEQ ID NO: 3550 - RNA, 20 nt, synthetic construct
  source 1..20: mol_type = other RNA
tgtaccctgggcagtagaat

SEQ ID NO: 3551 - RNA, 20 nt, synthetic construct
  source 1..20: mol_type = other RNA
tgtagagccaggacctgaac

SEQ ID NO: 3552 - RNA, 20 nt, synthetic construct
  source 1..20: mol_type = other RNA
tgtagagggtcagtaatatg

SEQ ID NO: 3553 - RNA, 20 nt, synthetic construct
  source 1..20: mol_type = other RNA
tgtagcctactacacgcata

SEQ ID NO: 3554 - RNA, 20 nt, synthetic construct
  source 1..20: mol_type = other RNA
tgtagcctatgcgtgtagta

SEQ ID NO: 3555 - RNA, 20 nt, synthetic construct
  source 1..20: mol_type = other RNA
tgtaggattcttctttccct

SEQ ID NO: 3556 - RNA, 20 nt, synthetic construct
  source 1..20: mol_type = other RNA
tgtagtaggctacaacacct

SEQ ID NO: 3557 - RNA, 20 nt, synthetic construct
  source 1..20: mol_type = other RNA
tgtagttacatctattatag

SEQ ID NO: 3558 - RNA, 20 nt, synthetic construct
  source 1..20: mol_type = other RNA
tgtataactcctctcttctg

SEQ ID NO: 3559 - RNA, 20 nt, synthetic construct
  source 1..20: mol_type = other RNA
tgtatggccccaggtatggc

SEQ ID NO: 3560 - RNA, 20 nt, synthetic construct
  source 1..20: mol_type = other RNA
tgtatggggactgtgtttgc

SEQ ID NO: 3561 - RNA, 20 nt, synthetic construct
  source 1..20: mol_type = other RNA
tgtcaatgttctccacatag

SEQ ID NO: 3562 - RNA, 20 nt, synthetic construct
  source 1..20: mol_type = other RNA
tgtccaatgtggaaatggca

SEQ ID NO: 3563 - RNA, 20 nt, synthetic construct
  source 1..20: mol_type = other RNA
tgtccccgtcattaagtaac

SEQ ID NO: 3564 - RNA, 20 nt, synthetic construct
  source 1..20: mol_type = other RNA
tgtcctgaggactatttata

SEQ ID NO: 3565 - RNA, 20 nt, synthetic construct
  source 1..20: mol_type = other RNA
tgtctataaatagtcctcag

SEQ ID NO: 3566 - RNA, 20 nt, synthetic construct
  source 1..20: mol_type = other RNA
tgtctgaagaataaaacaac

SEQ ID NO: 3567 - RNA, 20 nt, synthetic construct
  source 1..20: mol_type = other RNA
tgtctgcagagctgtataac

SEQ ID NO: 3568 - RNA, 20 nt, synthetic construct
  source 1..20: mol_type = other RNA
tgtgactgggcagatcatcc

SEQ ID NO: 3569 - RNA, 20 nt, synthetic construct
  source 1..20: mol_type = other RNA
tgtggaaatggcagaagaaa

SEQ ID NO: 3570 - RNA, 20 nt, synthetic construct
  source 1..20: mol_type = other RNA
tgtggagaacattgacagag

SEQ ID NO: 3571 - RNA, 20 nt, synthetic construct
  source 1..20: mol_type = other RNA
tgtggagtggcatgaagaag

SEQ ID NO: 3572 - RNA, 20 nt, synthetic construct
  source 1..20: mol_type = other RNA
tgtgggtaaccacctgcctt

SEQ ID NO: 3573 - RNA, 20 nt, synthetic construct
  source 1..20: mol_type = other RNA
tgtgtaagcatttctcagaa

SEQ ID NO: 3574 - RNA, 20 nt, synthetic construct
  source 1..20: mol_type = other RNA
tgtgttacttaatgacgggg

SEQ ID NO: 3575 - RNA, 20 nt, synthetic construct
  source 1..20: mol_type = other RNA
tgtgtttgcctcttagaggt

SEQ ID NO: 3576 - RNA, 20 nt, synthetic construct
  source 1..20: mol_type = other RNA
tgttactctgtcaatgttct

SEQ ID NO: 3577 - RNA, 20 nt, synthetic construct
  source 1..20: mol_type = other RNA
tgttacttaatgacggggac

SEQ ID NO: 3578 - RNA, 20 nt, synthetic construct
  source 1..20: mol_type = other RNA
tgttagagctgtctataaat

SEQ ID NO: 3579 - RNA, 20 nt, synthetic construct
  source 1..20: mol_type = other RNA
tgttagtaaattgtagagcc

SEQ ID NO: 3580 - RNA, 20 nt, synthetic construct
  source 1..20: mol_type = other RNA
tgttatattctagaacaggg

SEQ ID NO: 3581 - RNA, 20 nt, synthetic construct
  source 1..20: mol_type = other RNA
tgttcccttctcctgtggag

SEQ ID NO: 3582 - RNA, 20 nt, synthetic construct
  source 1..20: mol_type = other RNA
tgttctagaatataacagga

SEQ ID NO: 3583 - RNA, 20 nt, synthetic construct
  source 1..20: mol_type = other RNA
tgttctccacatagtgaggg

SEQ ID NO: 3584 - RNA, 20 nt, synthetic construct
  source 1..20: mol_type = other RNA
tgttctgagaaatgcttaca

SEQ ID NO: 3585 - RNA, 20 nt, synthetic construct
  source 1..20: mol_type = other RNA
tgttgtagcctactacacgc

SEQ ID NO: 3586 - RNA, 20 nt, synthetic construct
  source 1..20: mol_type = other RNA
tgttgttttattcttcagac

SEQ ID NO: 3587 - RNA, 20 nt, synthetic construct
  source 1..20: mol_type = other RNA
tgtttcactgtcctgaggac

SEQ ID NO: 3588 - RNA, 20 nt, synthetic construct
  source 1..20: mol_type = other RNA
tgtttccctttatctcctct

SEQ ID NO: 3589 - RNA, 20 nt, synthetic construct
  source 1..20: mol_type = other RNA
tgtttgcctcttagaggttc

SEQ ID NO: 3590 - RNA, 20 nt, synthetic construct
  source 1..20: mol_type = other RNA
tgttttattcttcagacaga

SEQ ID NO: 3591 - RNA, 20 nt, synthetic construct
  source 1..20: mol_type = other RNA
tgtttttgtttcactgtcct

SEQ ID NO: 3592 - RNA, 20 nt, synthetic construct
  source 1..20: mol_type = other RNA
ttaagtaacacatgactata

SEQ ID NO: 3593 - RNA, 20 nt, synthetic construct
  source 1..20: mol_type = other RNA
ttaatgacggggacatgttc

SEQ ID NO: 3594 - RNA, 20 nt, synthetic construct
  source 1..20: mol_type = other RNA
ttacacaaacctaggtgttg

SEQ ID NO: 3595 - RNA, 20 nt, synthetic construct
  source 1..20: mol_type = other RNA
ttacccacattacctgcaag

SEQ ID NO: 3596 - RNA, 20 nt, synthetic construct
  source 1..20: mol_type = other RNA
ttacctgcaaggctttgatc

SEQ ID NO: 3597 - RNA, 20 nt, synthetic construct
  source 1..20: mol_type = other RNA
ttactaacagtgtgactggg

SEQ ID NO: 3598 - RNA, 20 nt, synthetic construct
  source 1..20: mol_type = other RNA
ttactctgtcaatgttctcc

SEQ ID NO: 3599 - RNA, 20 nt, synthetic construct
  source 1..20: mol_type = other RNA
ttactgaccctctacagaga

SEQ ID NO: 3600 - RNA, 20 nt, synthetic construct
  source 1..20: mol_type = other RNA
ttacttaatgacggggacat

SEQ ID NO: 3601 - RNA, 20 nt, synthetic construct
  source 1..20: mol_type = other RNA
ttagagctgtctataaatag

SEQ ID NO: 3602 - RNA, 20 nt, synthetic construct
  source 1..20: mol_type = other RNA
ttagaggttcccaggccact

SEQ ID NO: 3603 - RNA, 20 nt, synthetic construct
  source 1..20: mol_type = other RNA
ttagagttcaggtcctggct

SEQ ID NO: 3604 - RNA, 20 nt, synthetic construct
  source 1..20: mol_type = other RNA
ttagcagggaaagaagaatc

SEQ ID NO: 3605 - RNA, 20 nt, synthetic construct
  source 1..20: mol_type = other RNA
ttagtaaattgtagagccag

SEQ ID NO: 3606 - RNA, 20 nt, synthetic construct
  source 1..20: mol_type = other RNA
ttagttggagtccaaaggct

SEQ ID NO: 3607 - RNA, 20 nt, synthetic construct
  source 1..20: mol_type = other RNA
ttataacaatctgtttccct

SEQ ID NO: 3608 - RNA, 20 nt, synthetic construct
  source 1..20: mol_type = other RNA
ttatacaaaggaaaagagtg

SEQ ID NO: 3609 - RNA, 20 nt, synthetic construct
  source 1..20: mol_type = other RNA
ttatacagctctgcagacat

SEQ ID NO: 3610 - RNA, 20 nt, synthetic construct
  source 1..20: mol_type = other RNA
ttatagacagctctaacatg

SEQ ID NO: 3611 - RNA, 20 nt, synthetic construct
  source 1..20: mol_type = other RNA
ttatattctagaacagggaa

SEQ ID NO: 3612 - RNA, 20 nt, synthetic construct
  source 1..20: mol_type = other RNA
ttatcatgttagagctgtct

SEQ ID NO: 3613 - RNA, 20 nt, synthetic construct
  source 1..20: mol_type = other RNA
ttatcctgcaataccatact

SEQ ID NO: 3614 - RNA, 20 nt, synthetic construct
  source 1..20: mol_type = other RNA
ttatctcctctagtggcctg

SEQ ID NO: 3615 - RNA, 20 nt, synthetic construct
  source 1..20: mol_type = other RNA
ttattcttcagacagaagag

SEQ ID NO: 3616 - RNA, 20 nt, synthetic construct
  source 1..20: mol_type = other RNA
ttcaaatctcctgttatatt

SEQ ID NO: 3617 - RNA, 20 nt, synthetic construct
  source 1..20: mol_type = other RNA
ttcaatgaaattctactgcc

SEQ ID NO: 3618 - RNA, 20 nt, synthetic construct
  source 1..20: mol_type = other RNA
ttcactgtcctgaggactat

SEQ ID NO: 3619 - RNA, 20 nt, synthetic construct
  source 1..20: mol_type = other RNA
ttcagacagaagagaggagt

SEQ ID NO: 3620 - RNA, 20 nt, synthetic construct
  source 1..20: mol_type = other RNA
ttcagcatcaatgtaccctg

SEQ ID NO: 3621 - RNA, 20 nt, synthetic construct
  source 1..20: mol_type = other RNA
ttcaggtcctggctctacaa

SEQ ID NO: 3622 - RNA, 20 nt, synthetic construct
  source 1..20: mol_type = other RNA
ttcatgccactccacaggag

SEQ ID NO: 3623 - RNA, 20 nt, synthetic construct
  source 1..20: mol_type = other RNA
ttcattgaaaagcctttgga

SEQ ID NO: 3624 - RNA, 20 nt, synthetic construct
  source 1..20: mol_type = other RNA
ttcattttctctcctcagca

SEQ ID NO: 3625 - RNA, 20 nt, synthetic construct
  source 1..20: mol_type = other RNA
ttccacattggacatctctg

SEQ ID NO: 3626 - RNA, 20 nt, synthetic construct
  source 1..20: mol_type = other RNA
ttcccaggccactagaggag

SEQ ID NO: 3627 - RNA, 20 nt, synthetic construct
  source 1..20: mol_type = other RNA
ttccctgctaaaatgttact

SEQ ID NO: 3628 - RNA, 20 nt, synthetic construct
  source 1..20: mol_type = other RNA
ttccctgttctagaatataa

SEQ ID NO: 3629 - RNA, 20 nt, synthetic construct
  source 1..20: mol_type = other RNA
ttcccttctcctgtggagtg

SEQ ID NO: 3630 - RNA, 20 nt, synthetic construct
  source 1..20: mol_type = other RNA
ttccctttatctcctctagt

SEQ ID NO: 3631 - RNA, 20 nt, synthetic construct
  source 1..20: mol_type = other RNA
ttcctccctctctcttgctt

SEQ ID NO: 3632 - RNA, 20 nt, synthetic construct
  source 1..20: mol_type = other RNA
ttcctgatgctctcccaaat

SEQ ID NO: 3633 - RNA, 20 nt, synthetic construct
  source 1..20: mol_type = other RNA
ttcctgtatggggactgtgt

SEQ ID NO: 3634 - RNA, 20 nt, synthetic construct
  source 1..20: mol_type = other RNA
ttcctttgccctctctgtag

SEQ ID NO: 3635 - RNA, 20 nt, synthetic construct
  source 1..20: mol_type = other RNA
ttcctttgtataatgttgtt

SEQ ID NO: 3636 - RNA, 20 nt, synthetic construct
  source 1..20: mol_type = other RNA
ttctactgcccagggtacat

SEQ ID NO: 3637 - RNA, 20 nt, synthetic construct
  source 1..20: mol_type = other RNA
ttctagaacagggaattgat

SEQ ID NO: 3638 - RNA, 20 nt, synthetic construct
  source 1..20: mol_type = other RNA
ttctagaatataacaggaga

SEQ ID NO: 3639 - RNA, 20 nt, synthetic construct
  source 1..20: mol_type = other RNA
ttctcagaacatgtccccgt

SEQ ID NO: 3640 - RNA, 20 nt, synthetic construct
  source 1..20: mol_type = other RNA
ttctccacatagtgagggtt

SEQ ID NO: 3641 - RNA, 20 nt, synthetic construct
  source 1..20: mol_type = other RNA
ttctcctgtggagtggcatg

SEQ ID NO: 3642 - RNA, 20 nt, synthetic construct
  source 1..20: mol_type = other RNA
ttctctcctcagcagagatg

SEQ ID NO: 3643 - RNA, 20 nt, synthetic construct
  source 1..20: mol_type = other RNA
ttctctgcatctttagttgg

SEQ ID NO: 3644 - RNA, 20 nt, synthetic construct
  source 1..20: mol_type = other RNA
ttctgagaaatgcttacaca

SEQ ID NO: 3645 - RNA, 20 nt, synthetic construct
  source 1..20: mol_type = other RNA
ttctgccatttccacattgg

SEQ ID NO: 3646 - RNA, 20 nt, synthetic construct
  source 1..20: mol_type = other RNA
ttctggagctccttgtagtt

SEQ ID NO: 3647 - RNA, 20 nt, synthetic construct
  source 1..20: mol_type = other RNA
ttctgtctgaagaataaaac

SEQ ID NO: 3648 - RNA, 20 nt, synthetic construct
  source 1..20: mol_type = other RNA
ttcttcagacagaagagagg

SEQ ID NO: 3649 - RNA, 20 nt, synthetic construct
  source 1..20: mol_type = other RNA
ttcttcatgccactccacag

SEQ ID NO: 3650 - RNA, 20 nt, synthetic construct
  source 1..20: mol_type = other RNA
ttcttctgccatttccacat

SEQ ID NO: 3651 - RNA, 20 nt, synthetic construct
  source 1..20: mol_type = other RNA
ttcttctttccctgctaaaa

SEQ ID NO: 3652 - RNA, 20 nt, synthetic construct
  source 1..20: mol_type = other RNA
ttctttccctgctaaaatgt

SEQ ID NO: 3653 - RNA, 20 nt, synthetic construct
  source 1..20: mol_type = other RNA
ttgaaaagcctttggactcc

SEQ ID NO: 3654 - RNA, 20 nt, synthetic construct
  source 1..20: mol_type = other RNA
ttgaatggggtttcagcatc

SEQ ID NO: 3655 - RNA, 20 nt, synthetic construct
  source 1..20: mol_type = other RNA
ttgacagagtaacattttag

SEQ ID NO: 3656 - RNA, 20 nt, synthetic construct
  source 1..20: mol_type = other RNA
ttgaccttgagaaaatgttt

SEQ ID NO: 3657 - RNA, 20 nt, synthetic construct
  source 1..20: mol_type = other RNA
ttgatctttcttctgccatt

SEQ ID NO: 3658 - RNA, 20 nt, synthetic construct
  source 1..20: mol_type = other RNA
ttgatgctgaaaccccattc

SEQ ID NO: 3659 - RNA, 20 nt, synthetic construct
  source 1..20: mol_type = other RNA
ttgatttgggagagcatcag

SEQ ID NO: 3660 - RNA, 20 nt, synthetic construct
  source 1..20: mol_type = other RNA
ttgcaggataaaggcaggtg

SEQ ID NO: 3661 - RNA, 20 nt, synthetic construct
  source 1..20: mol_type = other RNA
ttgcaggtaatgtgggtaac

SEQ ID NO: 3662 - RNA, 20 nt, synthetic construct
  source 1..20: mol_type = other RNA
ttgccctctctgtagagggt

SEQ ID NO: 3663 - RNA, 20 nt, synthetic construct
  source 1..20: mol_type = other RNA
ttgcctcttagaggttccca

SEQ ID NO: 3664 - RNA, 20 nt, synthetic construct
  source 1..20: mol_type = other RNA
ttgcttctggagctccttgt

SEQ ID NO: 3665 - RNA, 20 nt, synthetic construct
  source 1..20: mol_type = other RNA
ttggacatctctgctgagga

SEQ ID NO: 3666 - RNA, 20 nt, synthetic construct
  source 1..20: mol_type = other RNA
ttggactccaactaaagatg

SEQ ID NO: 3667 - RNA, 20 nt, synthetic construct
  source 1..20: mol_type = other RNA
ttggacttctctgcatcttt

SEQ ID NO: 3668 - RNA, 20 nt, synthetic construct
  source 1..20: mol_type = other RNA
ttggagtccaaaggcttttc

SEQ ID NO: 3669 - RNA, 20 nt, synthetic construct
  source 1..20: mol_type = other RNA
ttgggagagcatcaggaagg

SEQ ID NO: 3670 - RNA, 20 nt, synthetic construct
  source 1..20: mol_type = other RNA
ttgtagagccaggacctgaa

SEQ ID NO: 3671 - RNA, 20 nt, synthetic construct
  source 1..20: mol_type = other RNA
ttgtagcctactacacgcat

SEQ ID NO: 3672 - RNA, 20 nt, synthetic construct
  source 1..20: mol_type = other RNA
ttgtgtaagcatttctcaga

SEQ ID NO: 3673 - RNA, 20 nt, synthetic construct
  source 1..20: mol_type = other RNA
ttgtttcactgtcctgagga

SEQ ID NO: 3674 - RNA, 20 nt, synthetic construct
  source 1..20: mol_type = other RNA
ttgttttattcttcagacag

SEQ ID NO: 3675 - RNA, 20 nt, synthetic construct
  source 1..20: mol_type = other RNA
tttactaacagtgtgactgg

SEQ ID NO: 3676 - RNA, 20 nt, synthetic construct
  source 1..20: mol_type = other RNA
tttagcagggaaagaagaat

SEQ ID NO: 3677 - RNA, 20 nt, synthetic construct
  source 1..20: mol_type = other RNA
tttagttggagtccaaaggc

SEQ ID NO: 3678 - RNA, 20 nt, synthetic construct
  source 1..20: mol_type = other RNA
tttatagacagctctaacat

SEQ ID NO: 3679 - RNA, 20 nt, synthetic construct
  source 1..20: mol_type = other RNA
tttatcctgcaataccatac

SEQ ID NO: 3680 - RNA, 20 nt, synthetic construct
  source 1..20: mol_type = other RNA
tttatctcctctagtggcct

SEQ ID NO: 3681 - RNA, 20 nt, synthetic construct
  source 1..20: mol_type = other RNA
tttattcttcagacagaaga

SEQ ID NO: 3682 - RNA, 20 nt, synthetic construct
  source 1..20: mol_type = other RNA
tttcaatgaaattctactgc

SEQ ID NO: 3683 - RNA, 20 nt, synthetic construct
  source 1..20: mol_type = other RNA
tttcactgtcctgaggacta

SEQ ID NO: 3684 - RNA, 20 nt, synthetic construct
  source 1..20: mol_type = other RNA
tttcagcatcaatgtaccct

SEQ ID NO: 3685 - RNA, 20 nt, synthetic construct
  source 1..20: mol_type = other RNA
tttcattgaaaagcctttgg

SEQ ID NO: 3686 - RNA, 20 nt, synthetic construct
  source 1..20: mol_type = other RNA
tttccacattggacatctct

SEQ ID NO: 3687 - RNA, 20 nt, synthetic construct
  source 1..20: mol_type = other RNA
tttccctgctaaaatgttac

SEQ ID NO: 3688 - RNA, 20 nt, synthetic construct
  source 1..20: mol_type = other RNA
tttccctttatctcctctag

SEQ ID NO: 3689 - RNA, 20 nt, synthetic construct
  source 1..20: mol_type = other RNA
tttcctttgtataatgttgt

SEQ ID NO: 3690 - RNA, 20 nt, synthetic construct
  source 1..20: mol_type = other RNA
tttctcagaacatgtccccg

SEQ ID NO: 3691 - RNA, 20 nt, synthetic construct
  source 1..20: mol_type = other RNA
tttctctcctcagcagagat

SEQ ID NO: 3692 - RNA, 20 nt, synthetic construct
  source 1..20: mol_type = other RNA
tttcttctgccatttccaca

SEQ ID NO: 3693 - RNA, 20 nt, synthetic construct
  source 1..20: mol_type = other RNA
tttgaatggggtttcagcat

SEQ ID NO: 3694 - RNA, 20 nt, synthetic construct
  source 1..20: mol_type = other RNA
tttgaccttgagaaaatgtt

SEQ ID NO: 3695 - RNA, 20 nt, synthetic construct
  source 1..20: mol_type = other RNA
tttgatctttcttctgccat

SEQ ID NO: 3696 - RNA, 20 nt, synthetic construct
  source 1..20: mol_type = other RNA
tttgccctctctgtagaggg

SEQ ID NO: 3697 - RNA, 20 nt, synthetic construct
  source 1..20: mol_type = other RNA
tttgcctcttagaggttccc

SEQ ID NO: 3698 - RNA, 20 nt, synthetic construct
  source 1..20: mol_type = other RNA
tttggactccaactaaagat

SEQ ID NO: 3699 - RNA, 20 nt, synthetic construct
  source 1..20: mol_type = other RNA
tttgggagagcatcaggaag

SEQ ID NO: 3700 - RNA, 20 nt, synthetic construct
  source 1..20: mol_type = other RNA
tttgtgtaagcatttctcag

SEQ ID NO: 3701 - RNA, 20 nt, synthetic construct
  source 1..20: mol_type = other RNA
tttgtttcactgtcctgagg

SEQ ID NO: 3702 - RNA, 20 nt, synthetic construct
  source 1..20: mol_type = other RNA
ttttagcagggaaagaagaa

SEQ ID NO: 3703 - RNA, 20 nt, synthetic construct
  source 1..20: mol_type = other RNA
ttttattcttcagacagaag

SEQ ID NO: 3704 - RNA, 20 nt, synthetic construct
  source 1..20: mol_type = other RNA
ttttcaatgaaattctactg

SEQ ID NO: 3705 - RNA, 20 nt, synthetic construct
  source 1..20: mol_type = other RNA
ttttcctttgtataatgttg

SEQ ID NO: 3706 - RNA, 20 nt, synthetic construct
  source 1..20: mol_type = other RNA
ttttctctcctcagcagaga

SEQ ID NO: 3707 - RNA, 20 nt, synthetic construct
  source 1..20: mol_type = other RNA
ttttgaccttgagaaaatgt

SEQ ID NO: 3708 - RNA, 20 nt, synthetic construct
  source 1..20: mol_type = other RNA
ttttgtttcactgtcctgag

SEQ ID NO: 3709 - RNA, 20 nt, synthetic construct
  source 1..20: mol_type = other RNA
tttttgaccttgagaaaatg

SEQ ID NO: 3710 - RNA, 20 nt, synthetic construct
  source 1..20: mol_type = other RNA
tttttgtttcactgtcctga

SEQ ID NO: 3711 - RNA, 21 nt, synthetic construct
  source 1..21: mol_type = other RNA
aaaaacattttctcaaggtca

SEQ ID NO: 3712 - RNA, 21 nt, synthetic construct
  source 1..21: mol_type = other RNA
aaaacattttctcaaggtcaa

SEQ ID NO: 3713 - RNA, 21 nt, synthetic construct
  source 1..21: mol_type = other RNA
aaaagagtggttcattttctc

SEQ ID NO: 3714 - RNA, 21 nt, synthetic construct
  source 1..21: mol_type = other RNA
aaaagcctttggactccaact

SEQ ID NO: 3715 - RNA, 21 nt, synthetic construct
  source 1..21: mol_type = other RNA
aaaatgaaccactcttttcct

SEQ ID NO: 3716 - RNA, 21 nt, synthetic construct
  source 1..21: mol_type = other RNA
aaaatgttactctgtcaatgt

SEQ ID NO: 3717 - RNA, 21 nt, synthetic construct
  source 1..21: mol_type = other RNA
aaacacagtccccatacagga

SEQ ID NO: 3718 - RNA, 21 nt, synthetic construct
  source 1..21: mol_type = other RNA
aaaccccattcaaatctcctg

SEQ ID NO: 3719 - RNA, 21 nt, synthetic construct
  source 1..21: mol_type = other RNA
aaacctaggtgttgtagccta

SEQ ID NO: 3720 - RNA, 21 nt, synthetic construct
  source 1..21: mol_type = other RNA
aaagaagaatcctacagggtc

SEQ ID NO: 3721 - RNA, 21 nt, synthetic construct
  source 1..21: mol_type = other RNA
aaagagtggttcattttctct

SEQ ID NO: 3722 - RNA, 21 nt, synthetic construct
  source 1..21: mol_type = other RNA
aaagatcaaagccttgcaggt

SEQ ID NO: 3723 - RNA, 21 nt, synthetic construct
  source 1..21: mol_type = other RNA
aaagatgcagagaagtccaag

SEQ ID NO: 3724 - RNA, 21 nt, synthetic construct
  source 1..21: mol_type = other RNA
aaagccttgcaggtaatgtgg

SEQ ID NO: 3725 - RNA, 21 nt, synthetic construct
  source 1..21: mol_type = other RNA
aaagcctttggactccaacta

SEQ ID NO: 3726 - RNA, 21 nt, synthetic construct
  source 1..21: mol_type = other RNA
aaaggaaaagagtggttcatt

SEQ ID NO: 3727 - RNA, 21 nt, synthetic construct
  source 1..21: mol_type = other RNA
aaaggaactgccagtatggta

SEQ ID NO: 3728 - RNA, 21 nt, synthetic construct
  source 1..21: mol_type = other RNA
aaaggcaggtggttacccaca

SEQ ID NO: 3729 - RNA, 21 nt, synthetic construct
  source 1..21: mol_type = other RNA
aaaggcttttcaatgaaattc

SEQ ID NO: 3730 - RNA, 21 nt, synthetic construct
  source 1..21: mol_type = other RNA
aaagggaaacagattgttata

SEQ ID NO: 3731 - RNA, 21 nt, synthetic construct
  source 1..21: mol_type = other RNA
aaatagtcctcaggacagtga

SEQ ID NO: 3732 - RNA, 21 nt, synthetic construct
  source 1..21: mol_type = other RNA
aaatcaattccctgttctaga

SEQ ID NO: 3733 - RNA, 21 nt, synthetic construct
  source 1..21: mol_type = other RNA
aaatctcctgttatattctag

SEQ ID NO: 3734 - RNA, 21 nt, synthetic construct
  source 1..21: mol_type = other RNA
aaatgaaccactcttttcctt

SEQ ID NO: 3735 - RNA, 21 nt, synthetic construct
  source 1..21: mol_type = other RNA
aaatgcttacacaaacctagg

SEQ ID NO: 3736 - RNA, 21 nt, synthetic construct
  source 1..21: mol_type = other RNA
aaatggcagaagaaagatcaa

SEQ ID NO: 3737 - RNA, 21 nt, synthetic construct
  source 1..21: mol_type = other RNA
aaatgttactctgtcaatgtt

SEQ ID NO: 3738 - RNA, 21 nt, synthetic construct
  source 1..21: mol_type = other RNA
aaatgtttttgtttcactgtc

SEQ ID NO: 3739 - RNA, 21 nt, synthetic construct
  source 1..21: mol_type = other RNA
aaattctactgcccagggtac

SEQ ID NO: 3740 - RNA, 21 nt, synthetic construct
  source 1..21: mol_type = other RNA
aaattgtagagccaggacctg

SEQ ID NO: 3741 - RNA, 21 nt, synthetic construct
  source 1..21: mol_type = other RNA
aacaaaaacattttctcaagg

SEQ ID NO: 3742 - RNA, 21 nt, synthetic construct
  source 1..21: mol_type = other RNA
aacaatctgtttccctttatc

SEQ ID NO: 3743 - RNA, 21 nt, synthetic construct
  source 1..21: mol_type = other RNA
aacacagtccccatacaggaa

SEQ ID NO: 3744 - RNA, 21 nt, synthetic construct
  source 1..21: mol_type = other RNA
aacacatgactatattagagt

SEQ ID NO: 3745 - RNA, 21 nt, synthetic construct
  source 1..21: mol_type = other RNA
aacacctaggtttgtgtaagc

SEQ ID NO: 3746 - RNA, 21 nt, synthetic construct
  source 1..21: mol_type = other RNA
aacaggagatttgaatggggt

SEQ ID NO: 3747 - RNA, 21 nt, synthetic construct
  source 1..21: mol_type = other RNA
aacaggctgtacaggtttgta

SEQ ID NO: 3748 - RNA, 21 nt, synthetic construct
  source 1..21: mol_type = other RNA
aacagggaattgatttgggag

SEQ ID NO: 3749 - RNA, 21 nt, synthetic construct
  source 1..21: mol_type = other RNA
aacagtgtgactgggcagatc

SEQ ID NO: 3750 - RNA, 21 nt, synthetic construct
  source 1..21: mol_type = other RNA
aacatgaccctgtaggattct

SEQ ID NO: 3751 - RNA, 21 nt, synthetic construct
  source 1..21: mol_type = other RNA
aacatgataaccctcactatg

SEQ ID NO: 3752 - RNA, 21 nt, synthetic construct
  source 1..21: mol_type = other RNA
aacatgtccccgtcattaagt

SEQ ID NO: 3753 - RNA, 21 nt, synthetic construct
  source 1..21: mol_type = other RNA
aacattgacagagtaacattt

SEQ ID NO: 3754 - RNA, 21 nt, synthetic construct
  source 1..21: mol_type = other RNA
aacattttagcagggaaagaa

SEQ ID NO: 3755 - RNA, 21 nt, synthetic construct
  source 1..21: mol_type = other RNA
aaccacctgcctttatcctgc

SEQ ID NO: 3756 - RNA, 21 nt, synthetic construct
  source 1..21: mol_type = other RNA
aaccactcttttcctttgtat

SEQ ID NO: 3757 - RNA, 21 nt, synthetic construct
  source 1..21: mol_type = other RNA
aaccccattcaaatctcctgt

SEQ ID NO: 3758 - RNA, 21 nt, synthetic construct
  source 1..21: mol_type = other RNA
aaccctcactatgtggagaac

SEQ ID NO: 3759 - RNA, 21 nt, synthetic construct
  source 1..21: mol_type = other RNA
aacctaggtgttgtagcctac

SEQ ID NO: 3760 - RNA, 21 nt, synthetic construct
  source 1..21: mol_type = other RNA
aacctctaagaggcaaacaca

SEQ ID NO: 3761 - RNA, 21 nt, synthetic construct
  source 1..21: mol_type = other RNA
aactaaagatgcagagaagtc

SEQ ID NO: 3762 - RNA, 21 nt, synthetic construct
  source 1..21: mol_type = other RNA
aactacaaggagctccagaag

SEQ ID NO: 3763 - RNA, 21 nt, synthetic construct
  source 1..21: mol_type = other RNA
aactcctctcttctgtctgaa

SEQ ID NO: 3764 - RNA, 21 nt, synthetic construct
  source 1..21: mol_type = other RNA
aactctaatatagtcatgtgt

SEQ ID NO: 3765 - RNA, 21 nt, synthetic construct
  source 1..21: mol_type = other RNA
aactgccagtatggtattgca

SEQ ID NO: 3766 - RNA, 21 nt, synthetic construct
  source 1..21: mol_type = other RNA
aacttggacttctctgcatct

SEQ ID NO: 3767 - RNA, 21 nt, synthetic construct
  source 1..21: mol_type = other RNA
aagaaagatcaaagccttgca

SEQ ID NO: 3768 - RNA, 21 nt, synthetic construct
  source 1..21: mol_type = other RNA
aagaagaatcctacagggtca

SEQ ID NO: 3769 - RNA, 21 nt, synthetic construct
  source 1..21: mol_type = other RNA
aagaaggtgtatggccccagg

SEQ ID NO: 3770 - RNA, 21 nt, synthetic construct
  source 1..21: mol_type = other RNA
aagaatcctacagggtcatgt

SEQ ID NO: 3771 - RNA, 21 nt, synthetic construct
  source 1..21: mol_type = other RNA
aagagagagggaggaacttgg

SEQ ID NO: 3772 - RNA, 21 nt, synthetic construct
  source 1..21: mol_type = other RNA
aagagaggagttatacagctc

SEQ ID NO: 3773 - RNA, 21 nt, synthetic construct
  source 1..21: mol_type = other RNA
aagaggcaaacacagtcccca

SEQ ID NO: 3774 - RNA, 21 nt, synthetic construct
  source 1..21: mol_type = other RNA
aagagtggttcattttctctc

SEQ ID NO: 3775 - RNA, 21 nt, synthetic construct
  source 1..21: mol_type = other RNA
aagatcaaagccttgcaggta

SEQ ID NO: 3776 - RNA, 21 nt, synthetic construct
  source 1..21: mol_type = other RNA
aagatgcagagaagtccaagt

SEQ ID NO: 3777 - RNA, 21 nt, synthetic construct
  source 1..21: mol_type = other RNA
aagcaagagagagggaggaac

SEQ ID NO: 3778 - RNA, 21 nt, synthetic construct
  source 1..21: mol_type = other RNA
aagcatttctcagaacatgtc

SEQ ID NO: 3779 - RNA, 21 nt, synthetic construct
  source 1..21: mol_type = other RNA
aagccttgcaggtaatgtggg

SEQ ID NO: 3780 - RNA, 21 nt, synthetic construct
  source 1..21: mol_type = other RNA
aagcctttggactccaactaa

SEQ ID NO: 3781 - RNA, 21 nt, synthetic construct
  source 1..21: mol_type = other RNA
aaggaaaagagtggttcattt

SEQ ID NO: 3782 - RNA, 21 nt, synthetic construct
  source 1..21: mol_type = other RNA
aaggaactgccagtatggtat

SEQ ID NO: 3783 - RNA, 21 nt, synthetic construct
  source 1..21: mol_type = other RNA
aaggagctccagaagcaagag

SEQ ID NO: 3784 - RNA, 21 nt, synthetic construct
  source 1..21: mol_type = other RNA
aaggcaggtggttacccacat

SEQ ID NO: 3785 - RNA, 21 nt, synthetic construct
  source 1..21: mol_type = other RNA
aaggctttgatctttcttctg

SEQ ID NO: 3786 - RNA, 21 nt, synthetic construct
  source 1..21: mol_type = other RNA
aaggcttttcaatgaaattct

SEQ ID NO: 3787 - RNA, 21 nt, synthetic construct
  source 1..21: mol_type = other RNA
aagggaaacagattgttataa

SEQ ID NO: 3788 - RNA, 21 nt, synthetic construct
  source 1..21: mol_type = other RNA
aagggaacatgaccctgtagg

SEQ ID NO: 3789 - RNA, 21 nt, synthetic construct
  source 1..21: mol_type = other RNA
aaggtggatgatctgcccagt

SEQ ID NO: 3790 - RNA, 21 nt, synthetic construct
  source 1..21: mol_type = other RNA
aaggtgtatggccccaggtat

SEQ ID NO: 3791 - RNA, 21 nt, synthetic construct
  source 1..21: mol_type = other RNA
aagtccaagttcctccctctc

SEQ ID NO: 3792 - RNA, 21 nt, synthetic construct
  source 1..21: mol_type = other RNA
aagttataacaatctgtttcc

SEQ ID NO: 3793 - RNA, 21 nt, synthetic construct
  source 1..21: mol_type = other RNA
aagttcctccctctctcttgc

SEQ ID NO: 3794 - RNA, 21 nt, synthetic construct
  source 1..21: mol_type = other RNA
aagtttttgaccttgagaaaa

SEQ ID NO: 3795 - RNA, 21 nt, synthetic construct
  source 1..21: mol_type = other RNA
aataccatactggcagttcct

SEQ ID NO: 3796 - RNA, 21 nt, synthetic construct
  source 1..21: mol_type = other RNA
aatagatgtaactacaaggag

SEQ ID NO: 3797 - RNA, 21 nt, synthetic construct
  source 1..21: mol_type = other RNA
aataggctataccatgtagcc

SEQ ID NO: 3798 - RNA, 21 nt, synthetic construct
  source 1..21: mol_type = other RNA
aatagtcctcaggacagtgaa

SEQ ID NO: 3799 - RNA, 21 nt, synthetic construct
  source 1..21: mol_type = other RNA
aatatggccatacctggggcc

SEQ ID NO: 3800 - RNA, 21 nt, synthetic construct
  source 1..21: mol_type = other RNA
aatcaattccctgttctagaa

SEQ ID NO: 3801 - RNA, 21 nt, synthetic construct
  source 1..21: mol_type = other RNA
aatcctacagggtcatgttcc

SEQ ID NO: 3802 - RNA, 21 nt, synthetic construct
  source 1..21: mol_type = other RNA
aatctcctgttatattctaga

SEQ ID NO: 3803 - RNA, 21 nt, synthetic construct
  source 1..21: mol_type = other RNA
aatctgtttccctttatctcc

SEQ ID NO: 3804 - RNA, 21 nt, synthetic construct
  source 1..21: mol_type = other RNA
aatgaaattctactgcccagg

SEQ ID NO: 3805 - RNA, 21 nt, synthetic construct
  source 1..21: mol_type = other RNA
aatgaaccactcttttccttt

SEQ ID NO: 3806 - RNA, 21 nt, synthetic construct
  source 1..21: mol_type = other RNA
aatgacggggacatgttctga

SEQ ID NO: 3807 - RNA, 21 nt, synthetic construct
  source 1..21: mol_type = other RNA
aatgcttacacaaacctaggt

SEQ ID NO: 3808 - RNA, 21 nt, synthetic construct
  source 1..21: mol_type = other RNA
aatggcagaagaaagatcaaa

SEQ ID NO: 3809 - RNA, 21 nt, synthetic construct
  source 1..21: mol_type = other RNA
aatgggatgtctgcagagctg

SEQ ID NO: 3810 - RNA, 21 nt, synthetic construct
  source 1..21: mol_type = other RNA
aatggggtttcagcatcaatg

SEQ ID NO: 3811 - RNA, 21 nt, synthetic construct
  source 1..21: mol_type = other RNA
aatgtaccctgggcagtagaa

SEQ ID NO: 3812 - RNA, 21 nt, synthetic construct
  source 1..21: mol_type = other RNA
aatgtggaaatggcagaagaa

SEQ ID NO: 3813 - RNA, 21 nt, synthetic construct
  source 1..21: mol_type = other RNA
aatgtgggtaaccacctgcct

SEQ ID NO: 3814 - RNA, 21 nt, synthetic construct
  source 1..21: mol_type = other RNA
aatgttactctgtcaatgttc

SEQ ID NO: 3815 - RNA, 21 nt, synthetic construct
  source 1..21: mol_type = other RNA
aatgttctccacatagtgagg

SEQ ID NO: 3816 - RNA, 21 nt, synthetic construct
  source 1..21: mol_type = other RNA
aatgtttttgtttcactgtcc

SEQ ID NO: 3817 - RNA, 21 nt, synthetic construct
  source 1..21: mol_type = other RNA
aattccctgttctagaatata

SEQ ID NO: 3818 - RNA, 21 nt, synthetic construct
  source 1..21: mol_type = other RNA
aattctactgcccagggtaca

SEQ ID NO: 3819 - RNA, 21 nt, synthetic construct
  source 1..21: mol_type = other RNA
aattgatttgggagagcatca

SEQ ID NO: 3820 - RNA, 21 nt, synthetic construct
  source 1..21: mol_type = other RNA
aattgtagagccaggacctga

SEQ ID NO: 3821 - RNA, 21 nt, synthetic construct
  source 1..21: mol_type = other RNA
aatttactaacagtgtgactg

SEQ ID NO: 3822 - RNA, 21 nt, synthetic construct
  source 1..21: mol_type = other RNA
aatttcattgaaaagcctttg

SEQ ID NO: 3823 - RNA, 21 nt, synthetic construct
  source 1..21: mol_type = other RNA
acaaaaacattttctcaaggt

SEQ ID NO: 3824 - RNA, 21 nt, synthetic construct
  source 1..21: mol_type = other RNA
acaaacctaggtgttgtagcc

SEQ ID NO: 3825 - RNA, 21 nt, synthetic construct
  source 1..21: mol_type = other RNA
acaaaggaaaagagtggttca

SEQ ID NO: 3826 - RNA, 21 nt, synthetic construct
  source 1..21: mol_type = other RNA
acaacacctaggtttgtgtaa

SEQ ID NO: 3827 - RNA, 21 nt, synthetic construct
  source 1..21: mol_type = other RNA
acaaggagctccagaagcaag

SEQ ID NO: 3828 - RNA, 21 nt, synthetic construct
  source 1..21: mol_type = other RNA
acaatctgtttccctttatct

SEQ ID NO: 3829 - RNA, 21 nt, synthetic construct
  source 1..21: mol_type = other RNA
acaatttactaacagtgtgac

SEQ ID NO: 3830 - RNA, 21 nt, synthetic construct
  source 1..21: mol_type = other RNA
acacaaacctaggtgttgtag

SEQ ID NO: 3831 - RNA, 21 nt, synthetic construct
  source 1..21: mol_type = other RNA
acacagtccccatacaggaat

SEQ ID NO: 3832 - RNA, 21 nt, synthetic construct
  source 1..21: mol_type = other RNA
acacatgactatattagagtt

SEQ ID NO: 3833 - RNA, 21 nt, synthetic construct
  source 1..21: mol_type = other RNA
acacctaggtttgtgtaagca

SEQ ID NO: 3834 - RNA, 21 nt, synthetic construct
  source 1..21: mol_type = other RNA
acaccttcttcatgccactcc

SEQ ID NO: 3835 - RNA, 21 nt, synthetic construct
  source 1..21: mol_type = other RNA
acacgcataggctacatggta

SEQ ID NO: 3836 - RNA, 21 nt, synthetic construct
  source 1..21: mol_type = other RNA
acactgttagtaaattgtaga

SEQ ID NO: 3837 - RNA, 21 nt, synthetic construct
  source 1..21: mol_type = other RNA
acagaagagaggagttataca

SEQ ID NO: 3838 - RNA, 21 nt, synthetic construct
  source 1..21: mol_type = other RNA
acagagagggcaaaggaactg

SEQ ID NO: 3839 - RNA, 21 nt, synthetic construct
  source 1..21: mol_type = other RNA
acagagtaacattttagcagg

SEQ ID NO: 3840 - RNA, 21 nt, synthetic construct
  source 1..21: mol_type = other RNA
acagcctgttactgtactgaa

SEQ ID NO: 3841 - RNA, 21 nt, synthetic construct
  source 1..21: mol_type = other RNA
acagctctaacatgataaccc

SEQ ID NO: 3842 - RNA, 21 nt, synthetic construct
  source 1..21: mol_type = other RNA
acagctctgcagacatcccat

SEQ ID NO: 3843 - RNA, 21 nt, synthetic construct
  source 1..21: mol_type = other RNA
acaggaatgggatgtctgcag

SEQ ID NO: 3844 - RNA, 21 nt, synthetic construct
  source 1..21: mol_type = other RNA
acaggagaagggaacatgacc

SEQ ID NO: 3845 - RNA, 21 nt, synthetic construct
  source 1..21: mol_type = other RNA
acaggagatttgaatggggtt

SEQ ID NO: 3846 - RNA, 21 nt, synthetic construct
  source 1..21: mol_type = other RNA
acaggctgtacaggtttgtag

SEQ ID NO: 3847 - RNA, 21 nt, synthetic construct
  source 1..21: mol_type = other RNA
acagggaattgatttgggaga

SEQ ID NO: 3848 - RNA, 21 nt, synthetic construct
  source 1..21: mol_type = other RNA
acagggtcatgttcccttctc

SEQ ID NO: 3849 - RNA, 21 nt, synthetic construct
  source 1..21: mol_type = other RNA
acagtaacaggctgtacaggt

SEQ ID NO: 3850 - RNA, 21 nt, synthetic construct
  source 1..21: mol_type = other RNA
acagtccccatacaggaatgg

SEQ ID NO: 3851 - RNA, 21 nt, synthetic construct
  source 1..21: mol_type = other RNA
acagtgtgactgggcagatca

SEQ ID NO: 3852 - RNA, 21 nt, synthetic construct
  source 1..21: mol_type = other RNA
acatagtgagggttatcatgt

SEQ ID NO: 3853 - RNA, 21 nt, synthetic construct
  source 1..21: mol_type = other RNA
acatcccattcctgtatgggg

SEQ ID NO: 3854 - RNA, 21 nt, synthetic construct
  source 1..21: mol_type = other RNA
acatctctgctgaggagagaa

SEQ ID NO: 3855 - RNA, 21 nt, synthetic construct
  source 1..21: mol_type = other RNA
acatgaccctgtaggattctt

SEQ ID NO: 3856 - RNA, 21 nt, synthetic construct
  source 1..21: mol_type = other RNA
acatgactatattagagttca

SEQ ID NO: 3857 - RNA, 21 nt, synthetic construct
  source 1..21: mol_type = other RNA
acatgataaccctcactatgt

SEQ ID NO: 3858 - RNA, 21 nt, synthetic construct
  source 1..21: mol_type = other RNA
acatggtatagcctattgctc

SEQ ID NO: 3859 - RNA, 21 nt, synthetic construct
  source 1..21: mol_type = other RNA
acatgtccccgtcattaagta

SEQ ID NO: 3860 - RNA, 21 nt, synthetic construct
  source 1..21: mol_type = other RNA
acatgttctgagaaatgctta

SEQ ID NO: 3861 - RNA, 21 nt, synthetic construct
  source 1..21: mol_type = other RNA
acattacctgcaaggctttga

SEQ ID NO: 3862 - RNA, 21 nt, synthetic construct
  source 1..21: mol_type = other RNA
acattatacaaaggaaaagag

SEQ ID NO: 3863 - RNA, 21 nt, synthetic construct
  source 1..21: mol_type = other RNA
acattgacagagtaacatttt

SEQ ID NO: 3864 - RNA, 21 nt, synthetic construct
  source 1..21: mol_type = other RNA
acattgatgctgaaaccccat

SEQ ID NO: 3865 - RNA, 21 nt, synthetic construct
  source 1..21: mol_type = other RNA
acattggacatctctgctgag

SEQ ID NO: 3866 - RNA, 21 nt, synthetic construct
  source 1..21: mol_type = other RNA
acattttagcagggaaagaag

SEQ ID NO: 3867 - RNA, 21 nt, synthetic construct
  source 1..21: mol_type = other RNA
accacctgcctttatcctgca

SEQ ID NO: 3868 - RNA, 21 nt, synthetic construct
  source 1..21: mol_type = other RNA
accactcttttcctttgtata

SEQ ID NO: 3869 - RNA, 21 nt, synthetic construct
  source 1..21: mol_type = other RNA
accatactggcagttcctttg

SEQ ID NO: 3870 - RNA, 21 nt, synthetic construct
  source 1..21: mol_type = other RNA
accatgtagcctatgcgtgta

SEQ ID NO: 3871 - RNA, 21 nt, synthetic construct
  source 1..21: mol_type = other RNA
acccacattacctgcaaggct

SEQ ID NO: 3872 - RNA, 21 nt, synthetic construct
  source 1..21: mol_type = other RNA
accccattcaaatctcctgtt

SEQ ID NO: 3873 - RNA, 21 nt, synthetic construct
  source 1..21: mol_type = other RNA
accctcactatgtggagaaca

SEQ ID NO: 3874 - RNA, 21 nt, synthetic construct
  source 1..21: mol_type = other RNA
accctctacagagagggcaaa

SEQ ID NO: 3875 - RNA, 21 nt, synthetic construct
  source 1..21: mol_type = other RNA
accctgggcagtagaatttca

SEQ ID NO: 3876 - RNA, 21 nt, synthetic construct
  source 1..21: mol_type = other RNA
accctgtaggattcttctttc

SEQ ID NO: 3877 - RNA, 21 nt, synthetic construct
  source 1..21: mol_type = other RNA
acctaggtgttgtagcctact

SEQ ID NO: 3878 - RNA, 21 nt, synthetic construct
  source 1..21: mol_type = other RNA
acctaggtttgtgtaagcatt

SEQ ID NO: 3879 - RNA, 21 nt, synthetic construct
  source 1..21: mol_type = other RNA
acctctaagaggcaaacacag

SEQ ID NO: 3880 - RNA, 21 nt, synthetic construct
  source 1..21: mol_type = other RNA
acctgaactctaatatagtca

SEQ ID NO: 3881 - RNA, 21 nt, synthetic construct
  source 1..21: mol_type = other RNA
acctgcaaggctttgatcttt

SEQ ID NO: 3882 - RNA, 21 nt, synthetic construct
  source 1..21: mol_type = other RNA
acctgcctttatcctgcaata

SEQ ID NO: 3883 - RNA, 21 nt, synthetic construct
  source 1..21: mol_type = other RNA
acctggggccatacaccttct

SEQ ID NO: 3884 - RNA, 21 nt, synthetic construct
  source 1..21: mol_type = other RNA
accttcctgatgctctcccaa

SEQ ID NO: 3885 - RNA, 21 nt, synthetic construct
  source 1..21: mol_type = other RNA
accttcttcatgccactccac

SEQ ID NO: 3886 - RNA, 21 nt, synthetic construct
  source 1..21: mol_type = other RNA
accttgagaaaatgtttttgt

SEQ ID NO: 3887 - RNA, 21 nt, synthetic construct
  source 1..21: mol_type = other RNA
acgcataggctacatggtata

SEQ ID NO: 3888 - RNA, 21 nt, synthetic construct
  source 1..21: mol_type = other RNA
acggggacatgttctgagaaa

SEQ ID NO: 3889 - RNA, 21 nt, synthetic construct
  source 1..21: mol_type = other RNA
actaaagatgcagagaagtcc

SEQ ID NO: 3890 - RNA, 21 nt, synthetic construct
  source 1..21: mol_type = other RNA
actaacagtgtgactgggcag

SEQ ID NO: 3891 - RNA, 21 nt, synthetic construct
  source 1..21: mol_type = other RNA
actacaaacctgtacagcctg

SEQ ID NO: 3892 - RNA, 21 nt, synthetic construct
  source 1..21: mol_type = other RNA
actacaaggagctccagaagc

SEQ ID NO: 3893 - RNA, 21 nt, synthetic construct
  source 1..21: mol_type = other RNA
actacacgcataggctacatg

SEQ ID NO: 3894 - RNA, 21 nt, synthetic construct
  source 1..21: mol_type = other RNA
actagaggagataaagggaaa

SEQ ID NO: 3895 - RNA, 21 nt, synthetic construct
  source 1..21: mol_type = other RNA
actatattagagttcaggtcc

SEQ ID NO: 3896 - RNA, 21 nt, synthetic construct
  source 1..21: mol_type = other RNA
actatgtggagaacattgaca

SEQ ID NO: 3897 - RNA, 21 nt, synthetic construct
  source 1..21: mol_type = other RNA
actatttatagacagctctaa

SEQ ID NO: 3898 - RNA, 21 nt, synthetic construct
  source 1..21: mol_type = other RNA
actccaactaaagatgcagag

SEQ ID NO: 3899 - RNA, 21 nt, synthetic construct
  source 1..21: mol_type = other RNA
actccacaggagaagggaaca

SEQ ID NO: 3900 - RNA, 21 nt, synthetic construct
  source 1..21: mol_type = other RNA
actcctctcttctgtctgaag

SEQ ID NO: 3901 - RNA, 21 nt, synthetic construct
  source 1..21: mol_type = other RNA
actctaatatagtcatgtgtt

SEQ ID NO: 3902 - RNA, 21 nt, synthetic construct
  source 1..21: mol_type = other RNA
actctgtcaatgttctccaca

SEQ ID NO: 3903 - RNA, 21 nt, synthetic construct
  source 1..21: mol_type = other RNA
actcttttcctttgtataatg

SEQ ID NO: 3904 - RNA, 21 nt, synthetic construct
  source 1..21: mol_type = other RNA
actgaccctctacagagaggg

SEQ ID NO: 3905 - RNA, 21 nt, synthetic construct
  source 1..21: mol_type = other RNA
actgccagtatggtattgcag

SEQ ID NO: 3906 - RNA, 21 nt, synthetic construct
  source 1..21: mol_type = other RNA
actgcccacagtattcagtac

SEQ ID NO: 3907 - RNA, 21 nt, synthetic construct
  source 1..21: mol_type = other RNA
actgcccagggtacattgatg

SEQ ID NO: 3908 - RNA, 21 nt, synthetic construct
  source 1..21: mol_type = other RNA
actggcagttcctttgccctc

SEQ ID NO: 3909 - RNA, 21 nt, synthetic construct
  source 1..21: mol_type = other RNA
actgggcagatcatccacctt

SEQ ID NO: 3910 - RNA, 21 nt, synthetic construct
  source 1..21: mol_type = other RNA
actgtcctgaggactatttat

SEQ ID NO: 3911 - RNA, 21 nt, synthetic construct
  source 1..21: mol_type = other RNA
actgtgtttgcctcttagagg

SEQ ID NO: 3912 - RNA, 21 nt, synthetic construct
  source 1..21: mol_type = other RNA
actgttagtaaattgtagagc

SEQ ID NO: 3913 - RNA, 21 nt, synthetic construct
  source 1..21: mol_type = other RNA
acttaatgacggggacatgtt

SEQ ID NO: 3914 - RNA, 21 nt, synthetic construct
  source 1..21: mol_type = other RNA
acttctctgcatctttagttg

SEQ ID NO: 3915 - RNA, 21 nt, synthetic construct
  source 1..21: mol_type = other RNA
acttggacttctctgcatctt

SEQ ID NO: 3916 - RNA, 21 nt, synthetic construct
  source 1..21: mol_type = other RNA
agaaaatgaaccactcttttc

SEQ ID NO: 3917 - RNA, 21 nt, synthetic construct
  source 1..21: mol_type = other RNA
agaaagatcaaagccttgcag

SEQ ID NO: 3918 - RNA, 21 nt, synthetic construct
  source 1..21: mol_type = other RNA
agaaatgcttacacaaaccta

SEQ ID NO: 3919 - RNA, 21 nt, synthetic construct
  source 1..21: mol_type = other RNA
agaacagggaattgatttggg

SEQ ID NO: 3920 - RNA, 21 nt, synthetic construct
  source 1..21: mol_type = other RNA
agaacatgtccccgtcattaa

SEQ ID NO: 3921 - RNA, 21 nt, synthetic construct
  source 1..21: mol_type = other RNA
agaacattgacagagtaacat

SEQ ID NO: 3922 - RNA, 21 nt, synthetic construct
  source 1..21: mol_type = other RNA
agaagaaagatcaaagccttg

SEQ ID NO: 3923 - RNA, 21 nt, synthetic construct
  source 1..21: mol_type = other RNA
agaagaatcctacagggtcat

SEQ ID NO: 3924 - RNA, 21 nt, synthetic construct
  source 1..21: mol_type = other RNA
agaagagaggagttatacagc

SEQ ID NO: 3925 - RNA, 21 nt, synthetic construct
  source 1..21: mol_type = other RNA
agaagcaagagagagggagga

SEQ ID NO: 3926 - RNA, 21 nt, synthetic construct
  source 1..21: mol_type = other RNA
agaagggaacatgaccctgta

SEQ ID NO: 3927 - RNA, 21 nt, synthetic construct
  source 1..21: mol_type = other RNA
agaaggtgtatggccccaggt

SEQ ID NO: 3928 - RNA, 21 nt, synthetic construct
  source 1..21: mol_type = other RNA
agaagtccaagttcctccctc

SEQ ID NO: 3929 - RNA, 21 nt, synthetic construct
  source 1..21: mol_type = other RNA
agaatataacaggagatttga

SEQ ID NO: 3930 - RNA, 21 nt, synthetic construct
  source 1..21: mol_type = other RNA
agaatcctacagggtcatgtt

SEQ ID NO: 3931 - RNA, 21 nt, synthetic construct
  source 1..21: mol_type = other RNA
agaatttcattgaaaagcctt

SEQ ID NO: 3932 - RNA, 21 nt, synthetic construct
  source 1..21: mol_type = other RNA
agacagaagagaggagttata

SEQ ID NO: 3933 - RNA, 21 nt, synthetic construct
  source 1..21: mol_type = other RNA
agacagctctaacatgataac

SEQ ID NO: 3934 - RNA, 21 nt, synthetic construct
  source 1..21: mol_type = other RNA
agacatcccattcctgtatgg

SEQ ID NO: 3935 - RNA, 21 nt, synthetic construct
  source 1..21: mol_type = other RNA
agactacaaacctgtacagcc

SEQ ID NO: 3936 - RNA, 21 nt, synthetic construct
  source 1..21: mol_type = other RNA
agagaaaatgaaccactcttt

SEQ ID NO: 3937 - RNA, 21 nt, synthetic construct
  source 1..21: mol_type = other RNA
agagaagtccaagttcctccc

SEQ ID NO: 3938 - RNA, 21 nt, synthetic construct
  source 1..21: mol_type = other RNA
agagagagggaggaacttgga

SEQ ID NO: 3939 - RNA, 21 nt, synthetic construct
  source 1..21: mol_type = other RNA
agagaggagttatacagctct

SEQ ID NO: 3940 - RNA, 21 nt, synthetic construct
  source 1..21: mol_type = other RNA
agagagggaggaacttggact

SEQ ID NO: 3941 - RNA, 21 nt, synthetic construct
  source 1..21: mol_type = other RNA
agagagggcaaaggaactgcc

SEQ ID NO: 3942 - RNA, 21 nt, synthetic construct
  source 1..21: mol_type = other RNA
agagatgtccaatgtggaaat

SEQ ID NO: 3943 - RNA, 21 nt, synthetic construct
  source 1..21: mol_type = other RNA
agagcatcaggaaggtggatg

SEQ ID NO: 3944 - RNA, 21 nt, synthetic construct
  source 1..21: mol_type = other RNA
agagccaggacctgaactcta

SEQ ID NO: 3945 - RNA, 21 nt, synthetic construct
  source 1..21: mol_type = other RNA
agagctgtataactcctctct

SEQ ID NO: 3946 - RNA, 21 nt, synthetic construct
  source 1..21: mol_type = other RNA
agagctgtctataaatagtcc

SEQ ID NO: 3947 - RNA, 21 nt, synthetic construct
  source 1..21: mol_type = other RNA
agaggagataaagggaaacag

SEQ ID NO: 3948 - RNA, 21 nt, synthetic construct
  source 1..21: mol_type = other RNA
agaggagttatacagctctgc

SEQ ID NO: 3949 - RNA, 21 nt, synthetic construct
  source 1..21: mol_type = other RNA
agaggcaaacacagtccccat

SEQ ID NO: 3950 - RNA, 21 nt, synthetic construct
  source 1..21: mol_type = other RNA
agagggaggaacttggacttc

SEQ ID NO: 3951 - RNA, 21 nt, synthetic construct
  source 1..21: mol_type = other RNA
agagggcaaaggaactgccag

SEQ ID NO: 3952 - RNA, 21 nt, synthetic construct
  source 1..21: mol_type = other RNA
agagggtcagtaatatggcca

SEQ ID NO: 3953 - RNA, 21 nt, synthetic construct
  source 1..21: mol_type = other RNA
agaggttcccaggccactaga

SEQ ID NO: 3954 - RNA, 21 nt, synthetic construct
  source 1..21: mol_type = other RNA
agagtaacattttagcaggga

SEQ ID NO: 3955 - RNA, 21 nt, synthetic construct
  source 1..21: mol_type = other RNA
agagtggttcattttctctcc

SEQ ID NO: 3956 - RNA, 21 nt, synthetic construct
  source 1..21: mol_type = other RNA
agagttcaggtcctggctcta

SEQ ID NO: 3957 - RNA, 21 nt, synthetic construct
  source 1..21: mol_type = other RNA
agataaagggaaacagattgt

SEQ ID NO: 3958 - RNA, 21 nt, synthetic construct
  source 1..21: mol_type = other RNA
agatcaaagccttgcaggtaa

SEQ ID NO: 3959 - RNA, 21 nt, synthetic construct
  source 1..21: mol_type = other RNA
agatcatccaccttcctgatg

SEQ ID NO: 3960 - RNA, 21 nt, synthetic construct
  source 1..21: mol_type = other RNA
agatgcagagaagtccaagtt

SEQ ID NO: 3961 - RNA, 21 nt, synthetic construct
  source 1..21: mol_type = other RNA
agatgtaactacaaggagctc

SEQ ID NO: 3962 - RNA, 21 nt, synthetic construct
  source 1..21: mol_type = other RNA
agatgtccaatgtggaaatgg

SEQ ID NO: 3963 - RNA, 21 nt, synthetic construct
  source 1..21: mol_type = other RNA
agatttgaatggggtttcagc

SEQ ID NO: 3964 - RNA, 21 nt, synthetic construct
  source 1..21: mol_type = other RNA
agcaagagagagggaggaact

SEQ ID NO: 3965 - RNA, 21 nt, synthetic construct
  source 1..21: mol_type = other RNA
agcaataggctataccatgta

SEQ ID NO: 3966 - RNA, 21 nt, synthetic construct
  source 1..21: mol_type = other RNA
agcagagatgtccaatgtgga

SEQ ID NO: 3967 - RNA, 21 nt, synthetic construct
  source 1..21: mol_type = other RNA
agcagggaaagaagaatccta

SEQ ID NO: 3968 - RNA, 21 nt, synthetic construct
  source 1..21: mol_type = other RNA
agcatcaatgtaccctgggca

SEQ ID NO: 3969 - RNA, 21 nt, synthetic construct
  source 1..21: mol_type = other RNA
agcatcaggaaggtggatgat

SEQ ID NO: 3970 - RNA, 21 nt, synthetic construct
  source 1..21: mol_type = other RNA
agcatttctcagaacatgtcc

SEQ ID NO: 3971 - RNA, 21 nt, synthetic construct
  source 1..21: mol_type = other RNA
agccaggacctgaactctaat

SEQ ID NO: 3972 - RNA, 21 nt, synthetic construct
  source 1..21: mol_type = other RNA
agcctactacacgcataggct

SEQ ID NO: 3973 - RNA, 21 nt, synthetic construct
  source 1..21: mol_type = other RNA
agcctatgcgtgtagtaggct

SEQ ID NO: 3974 - RNA, 21 nt, synthetic construct
  source 1..21: mol_type = other RNA
agcctgttactgtactgaata

SEQ ID NO: 3975 - RNA, 21 nt, synthetic construct
  source 1..21: mol_type = other RNA
agccttgcaggtaatgtgggt

SEQ ID NO: 3976 - RNA, 21 nt, synthetic construct
  source 1..21: mol_type = other RNA
agcctttggactccaactaaa

SEQ ID NO: 3977 - RNA, 21 nt, synthetic construct
  source 1..21: mol_type = other RNA
agctccagaagcaagagagag

SEQ ID NO: 3978 - RNA, 21 nt, synthetic construct
  source 1..21: mol_type = other RNA
agctccttgtagttacatcta

SEQ ID NO: 3979 - RNA, 21 nt, synthetic construct
  source 1..21: mol_type = other RNA
agctctaacatgataaccctc

SEQ ID NO: 3980 - RNA, 21 nt, synthetic construct
  source 1..21: mol_type = other RNA
agctctgcagacatcccattc

SEQ ID NO: 3981 - RNA, 21 nt, synthetic construct
  source 1..21: mol_type = other RNA
agctgtataactcctctcttc

SEQ ID NO: 3982 - RNA, 21 nt, synthetic construct
  source 1..21: mol_type = other RNA
agctgtctataaatagtcctc

SEQ ID NO: 3983 - RNA, 21 nt, synthetic construct
  source 1..21: mol_type = other RNA
aggaaaagagtggttcatttt

SEQ ID NO: 3984 - RNA, 21 nt, synthetic construct
  source 1..21: mol_type = other RNA
aggaactgccagtatggtatt

SEQ ID NO: 3985 - RNA, 21 nt, synthetic construct
  source 1..21: mol_type = other RNA
aggaacttggacttctctgca

SEQ ID NO: 3986 - RNA, 21 nt, synthetic construct
  source 1..21: mol_type = other RNA
aggaaggtggatgatctgccc

SEQ ID NO: 3987 - RNA, 21 nt, synthetic construct
  source 1..21: mol_type = other RNA
aggaatgggatgtctgcagag

SEQ ID NO: 3988 - RNA, 21 nt, synthetic construct
  source 1..21: mol_type = other RNA
aggacagtgaaacaaaaacat

SEQ ID NO: 3989 - RNA, 21 nt, synthetic construct
  source 1..21: mol_type = other RNA
aggacctgaactctaatatag

SEQ ID NO: 3990 - RNA, 21 nt, synthetic construct
  source 1..21: mol_type = other RNA
aggactatttatagacagctc

SEQ ID NO: 3991 - RNA, 21 nt, synthetic construct
  source 1..21: mol_type = other RNA
aggagaagggaacatgaccct

SEQ ID NO: 3992 - RNA, 21 nt, synthetic construct
  source 1..21: mol_type = other RNA
aggagagaaaatgaaccactc

SEQ ID NO: 3993 - RNA, 21 nt, synthetic construct
  source 1..21: mol_type = other RNA
aggagataaagggaaacagat

SEQ ID NO: 3994 - RNA, 21 nt, synthetic construct
  source 1..21: mol_type = other RNA
aggagatttgaatggggtttc

SEQ ID NO: 3995 - RNA, 21 nt, synthetic construct
  source 1..21: mol_type = other RNA
aggagctccagaagcaagaga

SEQ ID NO: 3996 - RNA, 21 nt, synthetic construct
  source 1..21: mol_type = other RNA
aggagttatacagctctgcag

SEQ ID NO: 3997 - RNA, 21 nt, synthetic construct
  source 1..21: mol_type = other RNA
aggataaaggcaggtggttac

SEQ ID NO: 3998 - RNA, 21 nt, synthetic construct
  source 1..21: mol_type = other RNA
aggattcttctttccctgcta

SEQ ID NO: 3999 - RNA, 21 nt, synthetic construct
  source 1..21: mol_type = other RNA
aggcaaacacagtccccatac

SEQ ID NO: 4000 - RNA, 21 nt, synthetic construct
  source 1..21: mol_type = other RNA
aggcaggtggttacccacatt

SEQ ID NO: 4001 - RNA, 21 nt, synthetic construct
  source 1..21: mol_type = other RNA
aggccactagaggagataaag

SEQ ID NO: 4002 - RNA, 21 nt, synthetic construct
  source 1..21: mol_type = other RNA
aggctacaacacctaggtttg

SEQ ID NO: 4003 - RNA, 21 nt, synthetic construct
  source 1..21: mol_type = other RNA
aggctataccatgtagcctat

SEQ ID NO: 4004 - RNA, 21 nt, synthetic construct
  source 1..21: mol_type = other RNA
aggctgtacaggtttgtagtc

SEQ ID NO: 4005 - RNA, 21 nt, synthetic construct
  source 1..21: mol_type = other RNA
aggctttgatctttcttctgc

SEQ ID NO: 4006 - RNA, 21 nt, synthetic construct
  source 1..21: mol_type = other RNA
aggcttttcaatgaaattcta

SEQ ID NO: 4007 - RNA, 21 nt, synthetic construct
  source 1..21: mol_type = other RNA
agggaaacagattgttataac

SEQ ID NO: 4008 - RNA, 21 nt, synthetic construct
  source 1..21: mol_type = other RNA
agggaaagaagaatcctacag

SEQ ID NO: 4009 - RNA, 21 nt, synthetic construct
  source 1..21: mol_type = other RNA
agggaacatgaccctgtagga

SEQ ID NO: 4010 - RNA, 21 nt, synthetic construct
  source 1..21: mol_type = other RNA
agggaattgatttgggagagc

SEQ ID NO: 4011 - RNA, 21 nt, synthetic construct
  source 1..21: mol_type = other RNA
agggaggaacttggacttctc

SEQ ID NO: 4012 - RNA, 21 nt, synthetic construct
  source 1..21: mol_type = other RNA
agggcaaaggaactgccagta

SEQ ID NO: 4013 - RNA, 21 nt, synthetic construct
  source 1..21: mol_type = other RNA
agggtacattgatgctgaaac

SEQ ID NO: 4014 - RNA, 21 nt, synthetic construct
  source 1..21: mol_type = other RNA
agggtcagtaatatggccata

SEQ ID NO: 4015 - RNA, 21 nt, synthetic construct
  source 1..21: mol_type = other RNA
agggtcatgttcccttctcct

SEQ ID NO: 4016 - RNA, 21 nt, synthetic construct
  source 1..21: mol_type = other RNA
agggttatcatgttagagctg

SEQ ID NO: 4017 - RNA, 21 nt, synthetic construct
  source 1..21: mol_type = other RNA
aggtaatgtgggtaaccacct

SEQ ID NO: 4018 - RNA, 21 nt, synthetic construct
  source 1..21: mol_type = other RNA
aggtatggccatattactgac

SEQ ID NO: 4019 - RNA, 21 nt, synthetic construct
  source 1..21: mol_type = other RNA
aggtcctggctctacaattta

SEQ ID NO: 4020 - RNA, 21 nt, synthetic construct
  source 1..21: mol_type = other RNA
aggtggatgatctgcccagtc

SEQ ID NO: 4021 - RNA, 21 nt, synthetic construct
  source 1..21: mol_type = other RNA
aggtggttacccacattacct

SEQ ID NO: 4022 - RNA, 21 nt, synthetic construct
  source 1..21: mol_type = other RNA
aggtgtatggccccaggtatg

SEQ ID NO: 4023 - RNA, 21 nt, synthetic construct
  source 1..21: mol_type = other RNA
aggtgttgtagcctactacac

SEQ ID NO: 4024 - RNA, 21 nt, synthetic construct
  source 1..21: mol_type = other RNA
aggttcccaggccactagagg

SEQ ID NO: 4025 - RNA, 21 nt, synthetic construct
  source 1..21: mol_type = other RNA
aggtttgtgtaagcatttctc

SEQ ID NO: 4026 - RNA, 21 nt, synthetic construct
  source 1..21: mol_type = other RNA
agtaaattgtagagccaggac

SEQ ID NO: 4027 - RNA, 21 nt, synthetic construct
  source 1..21: mol_type = other RNA
agtaacacatgactatattag

SEQ ID NO: 4028 - RNA, 21 nt, synthetic construct
  source 1..21: mol_type = other RNA
agtaacaggctgtacaggttt

SEQ ID NO: 4029 - RNA, 21 nt, synthetic construct
  source 1..21: mol_type = other RNA
agtaacattttagcagggaaa

SEQ ID NO: 4030 - RNA, 21 nt, synthetic construct
  source 1..21: mol_type = other RNA
agtaatatggccatacctggg

SEQ ID NO: 4031 - RNA, 21 nt, synthetic construct
  source 1..21: mol_type = other RNA
agtagaatttcattgaaaagc

SEQ ID NO: 4032 - RNA, 21 nt, synthetic construct
  source 1..21: mol_type = other RNA
agtaggctacaacacctaggt

SEQ ID NO: 4033 - RNA, 21 nt, synthetic construct
  source 1..21: mol_type = other RNA
agtatggtattgcaggataaa

SEQ ID NO: 4034 - RNA, 21 nt, synthetic construct
  source 1..21: mol_type = other RNA
agtcacactgttagtaaattg

SEQ ID NO: 4035 - RNA, 21 nt, synthetic construct
  source 1..21: mol_type = other RNA
agtcatgtgttacttaatgac

SEQ ID NO: 4036 - RNA, 21 nt, synthetic construct
  source 1..21: mol_type = other RNA
agtccaaaggcttttcaatga

SEQ ID NO: 4037 - RNA, 21 nt, synthetic construct
  source 1..21: mol_type = other RNA
agtccaagttcctccctctct

SEQ ID NO: 4038 - RNA, 21 nt, synthetic construct
  source 1..21: mol_type = other RNA
agtccccatacaggaatggga

SEQ ID NO: 4039 - RNA, 21 nt, synthetic construct
  source 1..21: mol_type = other RNA
agtcctcaggacagtgaaaca

SEQ ID NO: 4040 - RNA, 21 nt, synthetic construct
  source 1..21: mol_type = other RNA
agtctaggagcaataggctat

SEQ ID NO: 4041 - RNA, 21 nt, synthetic construct
  source 1..21: mol_type = other RNA
agtgagggttatcatgttaga

SEQ ID NO: 4042 - RNA, 21 nt, synthetic construct
  source 1..21: mol_type = other RNA
agtggcatgaagaaggtgtat

SEQ ID NO: 4043 - RNA, 21 nt, synthetic construct
  source 1..21: mol_type = other RNA
agtggcctgggaacctctaag

SEQ ID NO: 4044 - RNA, 21 nt, synthetic construct
  source 1..21: mol_type = other RNA
agtggttcattttctctcctc

SEQ ID NO: 4045 - RNA, 21 nt, synthetic construct
  source 1..21: mol_type = other RNA
agtgtgactgggcagatcatc

SEQ ID NO: 4046 - RNA, 21 nt, synthetic construct
  source 1..21: mol_type = other RNA
agttataacaatctgtttccc

SEQ ID NO: 4047 - RNA, 21 nt, synthetic construct
  source 1..21: mol_type = other RNA
agttatacagctctgcagaca

SEQ ID NO: 4048 - RNA, 21 nt, synthetic construct
  source 1..21: mol_type = other RNA
agttcaggtcctggctctaca

SEQ ID NO: 4049 - RNA, 21 nt, synthetic construct
  source 1..21: mol_type = other RNA
agttcctccctctctcttgct

SEQ ID NO: 4050 - RNA, 21 nt, synthetic construct
  source 1..21: mol_type = other RNA
agttcctttgccctctctgta

SEQ ID NO: 4051 - RNA, 21 nt, synthetic construct
  source 1..21: mol_type = other RNA
agttggagtccaaaggctttt

SEQ ID NO: 4052 - RNA, 21 nt, synthetic construct
  source 1..21: mol_type = other RNA
agtttttgaccttgagaaaat

SEQ ID NO: 4053 - RNA, 21 nt, synthetic construct
  source 1..21: mol_type = other RNA
ataaaggcaggtggttaccca

SEQ ID NO: 4054 - RNA, 21 nt, synthetic construct
  source 1..21: mol_type = other RNA
ataaagggaaacagattgtta

SEQ ID NO: 4055 - RNA, 21 nt, synthetic construct
  source 1..21: mol_type = other RNA
ataaatagtcctcaggacagt

SEQ ID NO: 4056 - RNA, 21 nt, synthetic construct
  source 1..21: mol_type = other RNA
ataacaatctgtttcccttta

SEQ ID NO: 4057 - RNA, 21 nt, synthetic construct
  source 1..21: mol_type = other RNA
ataacaggagatttgaatggg

SEQ ID NO: 4058 - RNA, 21 nt, synthetic construct
  source 1..21: mol_type = other RNA
ataaccctcactatgtggaga

SEQ ID NO: 4059 - RNA, 21 nt, synthetic construct
  source 1..21: mol_type = other RNA
ataactcctctcttctgtctg

SEQ ID NO: 4060 - RNA, 21 nt, synthetic construct
  source 1..21: mol_type = other RNA
ataatagatgtaactacaagg

SEQ ID NO: 4061 - RNA, 21 nt, synthetic construct
  source 1..21: mol_type = other RNA
atacaaaggaaaagagtggtt

SEQ ID NO: 4062 - RNA, 21 nt, synthetic construct
  source 1..21: mol_type = other RNA
atacaccttcttcatgccact

SEQ ID NO: 4063 - RNA, 21 nt, synthetic construct
  source 1..21: mol_type = other RNA
atacagctctgcagacatccc

SEQ ID NO: 4064 - RNA, 21 nt, synthetic construct
  source 1..21: mol_type = other RNA
atacaggaatgggatgtctgc

SEQ ID NO: 4065 - RNA, 21 nt, synthetic construct
  source 1..21: mol_type = other RNA
ataccatactggcagttcctt

SEQ ID NO: 4066 - RNA, 21 nt, synthetic construct
  source 1..21: mol_type = other RNA
ataccatgtagcctatgcgtg

SEQ ID NO: 4067 - RNA, 21 nt, synthetic construct
  source 1..21: mol_type = other RNA
atacctggggccatacacctt

SEQ ID NO: 4068 - RNA, 21 nt, synthetic construct
  source 1..21: mol_type = other RNA
atactggcagttcctttgccc

SEQ ID NO: 4069 - RNA, 21 nt, synthetic construct
  source 1..21: mol_type = other RNA
atagacagctctaacatgata

SEQ ID NO: 4070 - RNA, 21 nt, synthetic construct
  source 1..21: mol_type = other RNA
atagatgtaactacaaggagc

SEQ ID NO: 4071 - RNA, 21 nt, synthetic construct
  source 1..21: mol_type = other RNA
ataggctataccatgtagcct

SEQ ID NO: 4072 - RNA, 21 nt, synthetic construct
  source 1..21: mol_type = other RNA
atagtcatgtgttacttaatg

SEQ ID NO: 4073 - RNA, 21 nt, synthetic construct
  source 1..21: mol_type = other RNA
atagtcctcaggacagtgaaa

SEQ ID NO: 4074 - RNA, 21 nt, synthetic construct
  source 1..21: mol_type = other RNA
atagtgagggttatcatgtta

SEQ ID NO: 4075 - RNA, 21 nt, synthetic construct
  source 1..21: mol_type = other RNA
atataacaggagatttgaatg

SEQ ID NO: 4076 - RNA, 21 nt, synthetic construct
  source 1..21: mol_type = other RNA
atatggccatacctggggcca

SEQ ID NO: 4077 - RNA, 21 nt, synthetic construct
  source 1..21: mol_type = other RNA
atattactgaccctctacaga

SEQ ID NO: 4078 - RNA, 21 nt, synthetic construct
  source 1..21: mol_type = other RNA
atattagagttcaggtcctgg

SEQ ID NO: 4079 - RNA, 21 nt, synthetic construct
  source 1..21: mol_type = other RNA
atattctagaacagggaattg

SEQ ID NO: 4080 - RNA, 21 nt, synthetic construct
  source 1..21: mol_type = other RNA
atcaaagccttgcaggtaatg

SEQ ID NO: 4081 - RNA, 21 nt, synthetic construct
  source 1..21: mol_type = other RNA
atcaatgtaccctgggcagta

SEQ ID NO: 4082 - RNA, 21 nt, synthetic construct
  source 1..21: mol_type = other RNA
atcaattccctgttctagaat

SEQ ID NO: 4083 - RNA, 21 nt, synthetic construct
  source 1..21: mol_type = other RNA
atcaggaaggtggatgatctg

SEQ ID NO: 4084 - RNA, 21 nt, synthetic construct
  source 1..21: mol_type = other RNA
atcatccaccttcctgatgct

SEQ ID NO: 4085 - RNA, 21 nt, synthetic construct
  source 1..21: mol_type = other RNA
atcatgttagagctgtctata

SEQ ID NO: 4086 - RNA, 21 nt, synthetic construct
  source 1..21: mol_type = other RNA
atccaccttcctgatgctctc

SEQ ID NO: 4087 - RNA, 21 nt, synthetic construct
  source 1..21: mol_type = other RNA
atcccattcctgtatggggac

SEQ ID NO: 4088 - RNA, 21 nt, synthetic construct
  source 1..21: mol_type = other RNA
atcctacagggtcatgttccc

SEQ ID NO: 4089 - RNA, 21 nt, synthetic construct
  source 1..21: mol_type = other RNA
atcctgcaataccatactggc

SEQ ID NO: 4090 - RNA, 21 nt, synthetic construct
  source 1..21: mol_type = other RNA
atctcctctagtggcctggga

SEQ ID NO: 4091 - RNA, 21 nt, synthetic construct
  source 1..21: mol_type = other RNA
atctcctgttatattctagaa

SEQ ID NO: 4092 - RNA, 21 nt, synthetic construct
  source 1..21: mol_type = other RNA
atctctgctgaggagagaaaa

SEQ ID NO: 4093 - RNA, 21 nt, synthetic construct
  source 1..21: mol_type = other RNA
atctgcccagtcacactgtta

SEQ ID NO: 4094 - RNA, 21 nt, synthetic construct
  source 1..21: mol_type = other RNA
atctgtttccctttatctcct

SEQ ID NO: 4095 - RNA, 21 nt, synthetic construct
  source 1..21: mol_type = other RNA
atctttagttggagtccaaag

SEQ ID NO: 4096 - RNA, 21 nt, synthetic construct
  source 1..21: mol_type = other RNA
atctttcttctgccatttcca

SEQ ID NO: 4097 - RNA, 21 nt, synthetic construct
  source 1..21: mol_type = other RNA
atgaaattctactgcccaggg

SEQ ID NO: 4098 - RNA, 21 nt, synthetic construct
  source 1..21: mol_type = other RNA
atgaaccactcttttcctttg

SEQ ID NO: 4099 - RNA, 21 nt, synthetic construct
  source 1..21: mol_type = other RNA
atgaagaaggtgtatggcccc

SEQ ID NO: 4100 - RNA, 21 nt, synthetic construct
  source 1..21: mol_type = other RNA
atgaccctgtaggattcttct

SEQ ID NO: 4101 - RNA, 21 nt, synthetic construct
  source 1..21: mol_type = other RNA
atgacggggacatgttctgag

SEQ ID NO: 4102 - RNA, 21 nt, synthetic construct
  source 1..21: mol_type = other RNA
atgactatattagagttcagg

SEQ ID NO: 4103 - RNA, 21 nt, synthetic construct
  source 1..21: mol_type = other RNA
atgataaccctcactatgtgg

SEQ ID NO: 4104 - RNA, 21 nt, synthetic construct
  source 1..21: mol_type = other RNA
atgatctgcccagtcacactg

SEQ ID NO: 4105 - RNA, 21 nt, synthetic construct
  source 1..21: mol_type = other RNA
atgcagagaagtccaagttcc

SEQ ID NO: 4106 - RNA, 21 nt, synthetic construct
  source 1..21: mol_type = other RNA
atgccactccacaggagaagg

SEQ ID NO: 4107 - RNA, 21 nt, synthetic construct
  source 1..21: mol_type = other RNA
atgcgtgtagtaggctacaac

SEQ ID NO: 4108 - RNA, 21 nt, synthetic construct
  source 1..21: mol_type = other RNA
atgctctcccaaatcaattcc

SEQ ID NO: 4109 - RNA, 21 nt, synthetic construct
  source 1..21: mol_type = other RNA
atgctgaaaccccattcaaat

SEQ ID NO: 4110 - RNA, 21 nt, synthetic construct
  source 1..21: mol_type = other RNA
atgcttacacaaacctaggtg

SEQ ID NO: 4111 - RNA, 21 nt, synthetic construct
  source 1..21: mol_type = other RNA
atggcagaagaaagatcaaag

SEQ ID NO: 4112 - RNA, 21 nt, synthetic construct
  source 1..21: mol_type = other RNA
atggccatacctggggccata

SEQ ID NO: 4113 - RNA, 21 nt, synthetic construct
  source 1..21: mol_type = other RNA
atggccatattactgaccctc

SEQ ID NO: 4114 - RNA, 21 nt, synthetic construct
  source 1..21: mol_type = other RNA
atggccccaggtatggccata

SEQ ID NO: 4115 - RNA, 21 nt, synthetic construct
  source 1..21: mol_type = other RNA
atgggatgtctgcagagctgt

SEQ ID NO: 4116 - RNA, 21 nt, synthetic construct
  source 1..21: mol_type = other RNA
atggggactgtgtttgcctct

SEQ ID NO: 4117 - RNA, 21 nt, synthetic construct
  source 1..21: mol_type = other RNA
atggggtttcagcatcaatgt

SEQ ID NO: 4118 - RNA, 21 nt, synthetic construct
  source 1..21: mol_type = other RNA
atggtattgcaggataaaggc

SEQ ID NO: 4119 - RNA, 21 nt, synthetic construct
  source 1..21: mol_type = other RNA
atgtaactacaaggagctcca

SEQ ID NO: 4120 - RNA, 21 nt, synthetic construct
  source 1..21: mol_type = other RNA
atgtaccctgggcagtagaat

SEQ ID NO: 4121 - RNA, 21 nt, synthetic construct
  source 1..21: mol_type = other RNA
atgtagcctatgcgtgtagta

SEQ ID NO: 4122 - RNA, 21 nt, synthetic construct
  source 1..21: mol_type = other RNA
atgtccaatgtggaaatggca

SEQ ID NO: 4123 - RNA, 21 nt, synthetic construct
  source 1..21: mol_type = other RNA
atgtccccgtcattaagtaac

SEQ ID NO: 4124 - RNA, 21 nt, synthetic construct
  source 1..21: mol_type = other RNA
atgtctgcagagctgtataac

SEQ ID NO: 4125 - RNA, 21 nt, synthetic construct
  source 1..21: mol_type = other RNA
atgtggaaatggcagaagaaa

SEQ ID NO: 4126 - RNA, 21 nt, synthetic construct
  source 1..21: mol_type = other RNA
atgtggagaacattgacagag

SEQ ID NO: 4127 - RNA, 21 nt, synthetic construct
  source 1..21: mol_type = other RNA
atgtgggtaaccacctgcctt

SEQ ID NO: 4128 - RNA, 21 nt, synthetic construct
  source 1..21: mol_type = other RNA
atgtgttacttaatgacgggg

SEQ ID NO: 4129 - RNA, 21 nt, synthetic construct
  source 1..21: mol_type = other RNA
atgttactctgtcaatgttct

SEQ ID NO: 4130 - RNA, 21 nt, synthetic construct
  source 1..21: mol_type = other RNA
atgttagagctgtctataaat

SEQ ID NO: 4131 - RNA, 21 nt, synthetic construct
  source 1..21: mol_type = other RNA
atgttcccttctcctgtggag

SEQ ID NO: 4132 - RNA, 21 nt, synthetic construct
  source 1..21: mol_type = other RNA
atgttctccacatagtgaggg

SEQ ID NO: 4133 - RNA, 21 nt, synthetic construct
  source 1..21: mol_type = other RNA
atgttctgagaaatgcttaca

SEQ ID NO: 4134 - RNA, 21 nt, synthetic construct
  source 1..21: mol_type = other RNA
atgttgttttattcttcagac

SEQ ID NO: 4135 - RNA, 21 nt, synthetic construct
  source 1..21: mol_type = other RNA
atgtttttgtttcactgtcct

SEQ ID NO: 4136 - RNA, 21 nt, synthetic construct
  source 1..21: mol_type = other RNA
attacctgcaaggctttgatc

SEQ ID NO: 4137 - RNA, 21 nt, synthetic construct
  source 1..21: mol_type = other RNA
attactgaccctctacagaga

SEQ ID NO: 4138 - RNA, 21 nt, synthetic construct
  source 1..21: mol_type = other RNA
attagagttcaggtcctggct

SEQ ID NO: 4139 - RNA, 21 nt, synthetic construct
  source 1..21: mol_type = other RNA
attatacaaaggaaaagagtg

SEQ ID NO: 4140 - RNA, 21 nt, synthetic construct
  source 1..21: mol_type = other RNA
attccctgttctagaatataa

SEQ ID NO: 4141 - RNA, 21 nt, synthetic construct
  source 1..21: mol_type = other RNA
attcctgtatggggactgtgt

SEQ ID NO: 4142 - RNA, 21 nt, synthetic construct
  source 1..21: mol_type = other RNA
attctactgcccagggtacat

SEQ ID NO: 4143 - RNA, 21 nt, synthetic construct
  source 1..21: mol_type = other RNA
attctagaacagggaattgat

SEQ ID NO: 4144 - RNA, 21 nt, synthetic construct
  source 1..21: mol_type = other RNA
attcttcagacagaagagagg

SEQ ID NO: 4145 - RNA, 21 nt, synthetic construct
  source 1..21: mol_type = other RNA
attcttctttccctgctaaaa

SEQ ID NO: 4146 - RNA, 21 nt, synthetic construct
  source 1..21: mol_type = other RNA
attgaaaagcctttggactcc

SEQ ID NO: 4147 - RNA, 21 nt, synthetic construct
  source 1..21: mol_type = other RNA
attgacagagtaacattttag

SEQ ID NO: 4148 - RNA, 21 nt, synthetic construct
  source 1..21: mol_type = other RNA
attgatgctgaaaccccattc

SEQ ID NO: 4149 - RNA, 21 nt, synthetic construct
  source 1..21: mol_type = other RNA
attgatttgggagagcatcag

SEQ ID NO: 4150 - RNA, 21 nt, synthetic construct
  source 1..21: mol_type = other RNA
attgcaggataaaggcaggtg

SEQ ID NO: 4151 - RNA, 21 nt, synthetic construct
  source 1..21: mol_type = other RNA
attggacatctctgctgagga

SEQ ID NO: 4152 - RNA, 21 nt, synthetic construct
  source 1..21: mol_type = other RNA
attgtagagccaggacctgaa

SEQ ID NO: 4153 - RNA, 21 nt, synthetic construct
  source 1..21: mol_type = other RNA
atttactaacagtgtgactgg

SEQ ID NO: 4154 - RNA, 21 nt, synthetic construct
  source 1..21: mol_type = other RNA
atttatagacagctctaacat

SEQ ID NO: 4155 - RNA, 21 nt, synthetic construct
  source 1..21: mol_type = other RNA
atttcattgaaaagcctttgg

SEQ ID NO: 4156 - RNA, 21 nt, synthetic construct
  source 1..21: mol_type = other RNA
atttccacattggacatctct

SEQ ID NO: 4157 - RNA, 21 nt, synthetic construct
  source 1..21: mol_type = other RNA
atttctcagaacatgtccccg

SEQ ID NO: 4158 - RNA, 21 nt, synthetic construct
  source 1..21: mol_type = other RNA
atttgaatggggtttcagcat

SEQ ID NO: 4159 - RNA, 21 nt, synthetic construct
  source 1..21: mol_type = other RNA
atttgggagagcatcaggaag

SEQ ID NO: 4160 - RNA, 21 nt, synthetic construct
  source 1..21: mol_type = other RNA
attttagcagggaaagaagaa

SEQ ID NO: 4161 - RNA, 21 nt, synthetic construct
  source 1..21: mol_type = other RNA
attttctctcctcagcagaga

SEQ ID NO: 4162 - RNA, 21 nt, synthetic construct
  source 1..21: mol_type = other RNA
caaaaacattttctcaaggtc

SEQ ID NO: 4163 - RNA, 21 nt, synthetic construct
  source 1..21: mol_type = other RNA
caaacacagtccccatacagg

SEQ ID NO: 4164 - RNA, 21 nt, synthetic construct
  source 1..21: mol_type = other RNA
caaacctaggtgttgtagcct

SEQ ID NO: 4165 - RNA, 21 nt, synthetic construct
  source 1..21: mol_type = other RNA
caaagccttgcaggtaatgtg

SEQ ID NO: 4166 - RNA, 21 nt, synthetic construct
  source 1..21: mol_type = other RNA
caaaggaaaagagtggttcat

SEQ ID NO: 4167 - RNA, 21 nt, synthetic construct
  source 1..21: mol_type = other RNA
caaaggaactgccagtatggt

SEQ ID NO: 4168 - RNA, 21 nt, synthetic construct
  source 1..21: mol_type = other RNA
caaaggcttttcaatgaaatt

SEQ ID NO: 4169 - RNA, 21 nt, synthetic construct
  source 1..21: mol_type = other RNA
caaatcaattccctgttctag

SEQ ID NO: 4170 - RNA, 21 nt, synthetic construct
  source 1..21: mol_type = other RNA
caaatctcctgttatattcta

SEQ ID NO: 4171 - RNA, 21 nt, synthetic construct
  source 1..21: mol_type = other RNA
caacacctaggtttgtgtaag

SEQ ID NO: 4172 - RNA, 21 nt, synthetic construct
  source 1..21: mol_type = other RNA
caacattatacaaaggaaaag

SEQ ID NO: 4173 - RNA, 21 nt, synthetic construct
  source 1..21: mol_type = other RNA
caactaaagatgcagagaagt

SEQ ID NO: 4174 - RNA, 21 nt, synthetic construct
  source 1..21: mol_type = other RNA
caagagagagggaggaacttg

SEQ ID NO: 4175 - RNA, 21 nt, synthetic construct
  source 1..21: mol_type = other RNA
caaggagctccagaagcaaga

SEQ ID NO: 4176 - RNA, 21 nt, synthetic construct
  source 1..21: mol_type = other RNA
caaggctttgatctttcttct

SEQ ID NO: 4177 - RNA, 21 nt, synthetic construct
  source 1..21: mol_type = other RNA
caagttataacaatctgtttc

SEQ ID NO: 4178 - RNA, 21 nt, synthetic construct
  source 1..21: mol_type = other RNA
caagttcctccctctctcttg

SEQ ID NO: 4179 - RNA, 21 nt, synthetic construct
  source 1..21: mol_type = other RNA
caataccatactggcagttcc

SEQ ID NO: 4180 - RNA, 21 nt, synthetic construct
  source 1..21: mol_type = other RNA
caataggctataccatgtagc

SEQ ID NO: 4181 - RNA, 21 nt, synthetic construct
  source 1..21: mol_type = other RNA
caatctgtttccctttatctc

SEQ ID NO: 4182 - RNA, 21 nt, synthetic construct
  source 1..21: mol_type = other RNA
caatgaaattctactgcccag

SEQ ID NO: 4183 - RNA, 21 nt, synthetic construct
  source 1..21: mol_type = other RNA
caatgtaccctgggcagtaga

SEQ ID NO: 4184 - RNA, 21 nt, synthetic construct
  source 1..21: mol_type = other RNA
caatgtggaaatggcagaaga

SEQ ID NO: 4185 - RNA, 21 nt, synthetic construct
  source 1..21: mol_type = other RNA
caatgttctccacatagtgag

SEQ ID NO: 4186 - RNA, 21 nt, synthetic construct
  source 1..21: mol_type = other RNA
caattccctgttctagaatat

SEQ ID NO: 4187 - RNA, 21 nt, synthetic construct
  source 1..21: mol_type = other RNA
caatttactaacagtgtgact

SEQ ID NO: 4188 - RNA, 21 nt, synthetic construct
  source 1..21: mol_type = other RNA
cacaaacctaggtgttgtagc

SEQ ID NO: 4189 - RNA, 21 nt, synthetic construct
  source 1..21: mol_type = other RNA
cacactgttagtaaattgtag

SEQ ID NO: 4190 - RNA, 21 nt, synthetic construct
  source 1..21: mol_type = other RNA
cacaggagaagggaacatgac

SEQ ID NO: 4191 - RNA, 21 nt, synthetic construct
  source 1..21: mol_type = other RNA
cacagtattcagtacagtaac

SEQ ID NO: 4192 - RNA, 21 nt, synthetic construct
  source 1..21: mol_type = other RNA
cacagtccccatacaggaatg

SEQ ID NO: 4193 - RNA, 21 nt, synthetic construct
  source 1..21: mol_type = other RNA
cacatagtgagggttatcatg

SEQ ID NO: 4194 - RNA, 21 nt, synthetic construct
  source 1..21: mol_type = other RNA
cacatgactatattagagttc

SEQ ID NO: 4195 - RNA, 21 nt, synthetic construct
  source 1..21: mol_type = other RNA
cacattacctgcaaggctttg

SEQ ID NO: 4196 - RNA, 21 nt, synthetic construct
  source 1..21: mol_type = other RNA
cacattggacatctctgctga

SEQ ID NO: 4197 - RNA, 21 nt, synthetic construct
  source 1..21: mol_type = other RNA
cacctaggtttgtgtaagcat

SEQ ID NO: 4198 - RNA, 21 nt, synthetic construct
  source 1..21: mol_type = other RNA
cacctgcctttatcctgcaat

SEQ ID NO: 4199 - RNA, 21 nt, synthetic construct
  source 1..21: mol_type = other RNA
caccttcctgatgctctccca

SEQ ID NO: 4200 - RNA, 21 nt, synthetic construct
  source 1..21: mol_type = other RNA
caccttcttcatgccactcca

SEQ ID NO: 4201 - RNA, 21 nt, synthetic construct
  source 1..21: mol_type = other RNA
cacgcataggctacatggtat

SEQ ID NO: 4202 - RNA, 21 nt, synthetic construct
  source 1..21: mol_type = other RNA
cactagaggagataaagggaa

SEQ ID NO: 4203 - RNA, 21 nt, synthetic construct
  source 1..21: mol_type = other RNA
cactatgtggagaacattgac

SEQ ID NO: 4204 - RNA, 21 nt, synthetic construct
  source 1..21: mol_type = other RNA
cactccacaggagaagggaac

SEQ ID NO: 4205 - RNA, 21 nt, synthetic construct
  source 1..21: mol_type = other RNA
cactcttttcctttgtataat

SEQ ID NO: 4206 - RNA, 21 nt, synthetic construct
  source 1..21: mol_type = other RNA
cactgtcctgaggactattta

SEQ ID NO: 4207 - RNA, 21 nt, synthetic construct
  source 1..21: mol_type = other RNA
cactgttagtaaattgtagag

SEQ ID NO: 4208 - RNA, 21 nt, synthetic construct
  source 1..21: mol_type = other RNA
cagaacatgtccccgtcatta

SEQ ID NO: 4209 - RNA, 21 nt, synthetic construct
  source 1..21: mol_type = other RNA
cagaagaaagatcaaagcctt

SEQ ID NO: 4210 - RNA, 21 nt, synthetic construct
  source 1..21: mol_type = other RNA
cagaagagaggagttatacag

SEQ ID NO: 4211 - RNA, 21 nt, synthetic construct
  source 1..21: mol_type = other RNA
cagaagcaagagagagggagg

SEQ ID NO: 4212 - RNA, 21 nt, synthetic construct
  source 1..21: mol_type = other RNA
cagacagaagagaggagttat

SEQ ID NO: 4213 - RNA, 21 nt, synthetic construct
  source 1..21: mol_type = other RNA
cagacatcccattcctgtatg

SEQ ID NO: 4214 - RNA, 21 nt, synthetic construct
  source 1..21: mol_type = other RNA
cagagaagtccaagttcctcc

SEQ ID NO: 4215 - RNA, 21 nt, synthetic construct
  source 1..21: mol_type = other RNA
cagagagggcaaaggaactgc

SEQ ID NO: 4216 - RNA, 21 nt, synthetic construct
  source 1..21: mol_type = other RNA
cagagatgtccaatgtggaaa

SEQ ID NO: 4217 - RNA, 21 nt, synthetic construct
  source 1..21: mol_type = other RNA
cagagctgtataactcctctc

SEQ ID NO: 4218 - RNA, 21 nt, synthetic construct
  source 1..21: mol_type = other RNA
cagagtaacattttagcaggg

SEQ ID NO: 4219 - RNA, 21 nt, synthetic construct
  source 1..21: mol_type = other RNA
cagatcatccaccttcctgat

SEQ ID NO: 4220 - RNA, 21 nt, synthetic construct
  source 1..21: mol_type = other RNA
cagcagagatgtccaatgtgg

SEQ ID NO: 4221 - RNA, 21 nt, synthetic construct
  source 1..21: mol_type = other RNA
cagcatcaatgtaccctgggc

SEQ ID NO: 4222 - RNA, 21 nt, synthetic construct
  source 1..21: mol_type = other RNA
cagcctgttactgtactgaat

SEQ ID NO: 4223 - RNA, 21 nt, synthetic construct
  source 1..21: mol_type = other RNA
cagctctaacatgataaccct

SEQ ID NO: 4224 - RNA, 21 nt, synthetic construct
  source 1..21: mol_type = other RNA
cagctctgcagacatcccatt

SEQ ID NO: 4225 - RNA, 21 nt, synthetic construct
  source 1..21: mol_type = other RNA
caggaaggtggatgatctgcc

SEQ ID NO: 4226 - RNA, 21 nt, synthetic construct
  source 1..21: mol_type = other RNA
caggaatgggatgtctgcaga

SEQ ID NO: 4227 - RNA, 21 nt, synthetic construct
  source 1..21: mol_type = other RNA
caggacagtgaaacaaaaaca

SEQ ID NO: 4228 - RNA, 21 nt, synthetic construct
  source 1..21: mol_type = other RNA
caggacctgaactctaatata

SEQ ID NO: 4229 - RNA, 21 nt, synthetic construct
  source 1..21: mol_type = other RNA
caggagaagggaacatgaccc

SEQ ID NO: 4230 - RNA, 21 nt, synthetic construct
  source 1..21: mol_type = other RNA
caggagatttgaatggggttt

SEQ ID NO: 4231 - RNA, 21 nt, synthetic construct
  source 1..21: mol_type = other RNA
caggataaaggcaggtggtta

SEQ ID NO: 4232 - RNA, 21 nt, synthetic construct
  source 1..21: mol_type = other RNA
caggccactagaggagataaa

SEQ ID NO: 4233 - RNA, 21 nt, synthetic construct
  source 1..21: mol_type = other RNA
caggctgtacaggtttgtagt

SEQ ID NO: 4234 - RNA, 21 nt, synthetic construct
  source 1..21: mol_type = other RNA
cagggaaagaagaatcctaca

SEQ ID NO: 4235 - RNA, 21 nt, synthetic construct
  source 1..21: mol_type = other RNA
cagggaattgatttgggagag

SEQ ID NO: 4236 - RNA, 21 nt, synthetic construct
  source 1..21: mol_type = other RNA
cagggtacattgatgctgaaa

SEQ ID NO: 4237 - RNA, 21 nt, synthetic construct
  source 1..21: mol_type = other RNA
cagggtcatgttcccttctcc

SEQ ID NO: 4238 - RNA, 21 nt, synthetic construct
  source 1..21: mol_type = other RNA
caggtaatgtgggtaaccacc

SEQ ID NO: 4239 - RNA, 21 nt, synthetic construct
  source 1..21: mol_type = other RNA
caggtatggccatattactga

SEQ ID NO: 4240 - RNA, 21 nt, synthetic construct
  source 1..21: mol_type = other RNA
caggtcctggctctacaattt

SEQ ID NO: 4241 - RNA, 21 nt, synthetic construct
  source 1..21: mol_type = other RNA
caggtggttacccacattacc

SEQ ID NO: 4242 - RNA, 21 nt, synthetic construct
  source 1..21: mol_type = other RNA
cagtaacaggctgtacaggtt

SEQ ID NO: 4243 - RNA, 21 nt, synthetic construct
  source 1..21: mol_type = other RNA
cagtaatatggccatacctgg

SEQ ID NO: 4244 - RNA, 21 nt, synthetic construct
  source 1..21: mol_type = other RNA
cagtagaatttcattgaaaag

SEQ ID NO: 4245 - RNA, 21 nt, synthetic construct
  source 1..21: mol_type = other RNA
cagtatggtattgcaggataa

SEQ ID NO: 4246 - RNA, 21 nt, synthetic construct
  source 1..21: mol_type = other RNA
cagtcacactgttagtaaatt

SEQ ID NO: 4247 - RNA, 21 nt, synthetic construct
  source 1..21: mol_type = other RNA
cagtccccatacaggaatggg

SEQ ID NO: 4248 - RNA, 21 nt, synthetic construct
  source 1..21: mol_type = other RNA
cagtgaaacaaaaacattttc

SEQ ID NO: 4249 - RNA, 21 nt, synthetic construct
  source 1..21: mol_type = other RNA
cagtgtgactgggcagatcat

SEQ ID NO: 4250 - RNA, 21 nt, synthetic construct
  source 1..21: mol_type = other RNA
cagttcctttgccctctctgt

SEQ ID NO: 4251 - RNA, 21 nt, synthetic construct
  source 1..21: mol_type = other RNA
catacaccttcttcatgccac

SEQ ID NO: 4252 - RNA, 21 nt, synthetic construct
  source 1..21: mol_type = other RNA
catacaggaatgggatgtctg

SEQ ID NO: 4253 - RNA, 21 nt, synthetic construct
  source 1..21: mol_type = other RNA
catacctggggccatacacct

SEQ ID NO: 4254 - RNA, 21 nt, synthetic construct
  source 1..21: mol_type = other RNA
catactggcagttcctttgcc

SEQ ID NO: 4255 - RNA, 21 nt, synthetic construct
  source 1..21: mol_type = other RNA
catagtgagggttatcatgtt

SEQ ID NO: 4256 - RNA, 21 nt, synthetic construct
  source 1..21: mol_type = other RNA
catattactgaccctctacag

SEQ ID NO: 4257 - RNA, 21 nt, synthetic construct
  source 1..21: mol_type = other RNA
catcaatgtaccctgggcagt

SEQ ID NO: 4258 - RNA, 21 nt, synthetic construct
  source 1..21: mol_type = other RNA
catcaggaaggtggatgatct

SEQ ID NO: 4259 - RNA, 21 nt, synthetic construct
  source 1..21: mol_type = other RNA
catccaccttcctgatgctct

SEQ ID NO: 4260 - RNA, 21 nt, synthetic construct
  source 1..21: mol_type = other RNA
catcccattcctgtatgggga

SEQ ID NO: 4261 - RNA, 21 nt, synthetic construct
  source 1..21: mol_type = other RNA
catctctgctgaggagagaaa

SEQ ID NO: 4262 - RNA, 21 nt, synthetic construct
  source 1..21: mol_type = other RNA
catctttagttggagtccaaa

SEQ ID NO: 4263 - RNA, 21 nt, synthetic construct
  source 1..21: mol_type = other RNA
catgaagaaggtgtatggccc

SEQ ID NO: 4264 - RNA, 21 nt, synthetic construct
  source 1..21: mol_type = other RNA
catgaccctgtaggattcttc

SEQ ID NO: 4265 - RNA, 21 nt, synthetic construct
  source 1..21: mol_type = other RNA
catgactatattagagttcag

SEQ ID NO: 4266 - RNA, 21 nt, synthetic construct
  source 1..21: mol_type = other RNA
catgataaccctcactatgtg

SEQ ID NO: 4267 - RNA, 21 nt, synthetic construct
  source 1..21: mol_type = other RNA
catgccactccacaggagaag

SEQ ID NO: 4268 - RNA, 21 nt, synthetic construct
  source 1..21: mol_type = other RNA
catggtatagcctattgctcc

SEQ ID NO: 4269 - RNA, 21 nt, synthetic construct
  source 1..21: mol_type = other RNA
catgtagcctatgcgtgtagt

SEQ ID NO: 4270 - RNA, 21 nt, synthetic construct
  source 1..21: mol_type = other RNA
catgtccccgtcattaagtaa

SEQ ID NO: 4271 - RNA, 21 nt, synthetic construct
  source 1..21: mol_type = other RNA
catgtgttacttaatgacggg

SEQ ID NO: 4272 - RNA, 21 nt, synthetic construct
  source 1..21: mol_type = other RNA
catgttagagctgtctataaa

SEQ ID NO: 4273 - RNA, 21 nt, synthetic construct
  source 1..21: mol_type = other RNA
catgttcccttctcctgtgga

SEQ ID NO: 4274 - RNA, 21 nt, synthetic construct
  source 1..21: mol_type = other RNA
catgttctgagaaatgcttac

SEQ ID NO: 4275 - RNA, 21 nt, synthetic construct
  source 1..21: mol_type = other RNA
cattaagtaacacatgactat

SEQ ID NO: 4276 - RNA, 21 nt, synthetic construct
  source 1..21: mol_type = other RNA
cattacctgcaaggctttgat

SEQ ID NO: 4277 - RNA, 21 nt, synthetic construct
  source 1..21: mol_type = other RNA
cattatacaaaggaaaagagt

SEQ ID NO: 4278 - RNA, 21 nt, synthetic construct
  source 1..21: mol_type = other RNA
cattcaaatctcctgttatat

SEQ ID NO: 4279 - RNA, 21 nt, synthetic construct
  source 1..21: mol_type = other RNA
cattcctgtatggggactgtg

SEQ ID NO: 4280 - RNA, 21 nt, synthetic construct
  source 1..21: mol_type = other RNA
cattgaaaagcctttggactc

SEQ ID NO: 4281 - RNA, 21 nt, synthetic construct
  source 1..21: mol_type = other RNA
cattgacagagtaacatttta

SEQ ID NO: 4282 - RNA, 21 nt, synthetic construct
  source 1..21: mol_type = other RNA
cattgatgctgaaaccccatt

SEQ ID NO: 4283 - RNA, 21 nt, synthetic construct
  source 1..21: mol_type = other RNA
cattggacatctctgctgagg

SEQ ID NO: 4284 - RNA, 21 nt, synthetic construct
  source 1..21: mol_type = other RNA
catttccacattggacatctc

SEQ ID NO: 4285 - RNA, 21 nt, synthetic construct
  source 1..21: mol_type = other RNA
catttctcagaacatgtcccc

SEQ ID NO: 4286 - RNA, 21 nt, synthetic construct
  source 1..21: mol_type = other RNA
cattttagcagggaaagaaga

SEQ ID NO: 4287 - RNA, 21 nt, synthetic construct
  source 1..21: mol_type = other RNA
cattttctctcctcagcagag

SEQ ID NO: 4288 - RNA, 21 nt, synthetic construct
  source 1..21: mol_type = other RNA
ccaaaggcttttcaatgaaat

SEQ ID NO: 4289 - RNA, 21 nt, synthetic construct
  source 1..21: mol_type = other RNA
ccaaatcaattccctgttcta

SEQ ID NO: 4290 - RNA, 21 nt, synthetic construct
  source 1..21: mol_type = other RNA
ccaactaaagatgcagagaag

SEQ ID NO: 4291 - RNA, 21 nt, synthetic construct
  source 1..21: mol_type = other RNA
ccaagttcctccctctctctt

SEQ ID NO: 4292 - RNA, 21 nt, synthetic construct
  source 1..21: mol_type = other RNA
ccaatgtggaaatggcagaag

SEQ ID NO: 4293 - RNA, 21 nt, synthetic construct
  source 1..21: mol_type = other RNA
ccacaggagaagggaacatga

SEQ ID NO: 4294 - RNA, 21 nt, synthetic construct
  source 1..21: mol_type = other RNA
ccacagtattcagtacagtaa

SEQ ID NO: 4295 - RNA, 21 nt, synthetic construct
  source 1..21: mol_type = other RNA
ccacatagtgagggttatcat

SEQ ID NO: 4296 - RNA, 21 nt, synthetic construct
  source 1..21: mol_type = other RNA
ccacattacctgcaaggcttt

SEQ ID NO: 4297 - RNA, 21 nt, synthetic construct
  source 1..21: mol_type = other RNA
ccacattggacatctctgctg

SEQ ID NO: 4298 - RNA, 21 nt, synthetic construct
  source 1..21: mol_type = other RNA
ccacctgcctttatcctgcaa

SEQ ID NO: 4299 - RNA, 21 nt, synthetic construct
  source 1..21: mol_type = other RNA
ccaccttcctgatgctctccc

SEQ ID NO: 4300 - RNA, 21 nt, synthetic construct
  source 1..21: mol_type = other RNA
ccactagaggagataaaggga

SEQ ID NO: 4301 - RNA, 21 nt, synthetic construct
  source 1..21: mol_type = other RNA
ccactccacaggagaagggaa

SEQ ID NO: 4302 - RNA, 21 nt, synthetic construct
  source 1..21: mol_type = other RNA
ccactcttttcctttgtataa

SEQ ID NO: 4303 - RNA, 21 nt, synthetic construct
  source 1..21: mol_type = other RNA
ccagaagcaagagagagggag

SEQ ID NO: 4304 - RNA, 21 nt, synthetic construct
  source 1..21: mol_type = other RNA
ccaggacctgaactctaatat

SEQ ID NO: 4305 - RNA, 21 nt, synthetic construct
  source 1..21: mol_type = other RNA
ccaggccactagaggagataa

SEQ ID NO: 4306 - RNA, 21 nt, synthetic construct
  source 1..21: mol_type = other RNA
ccagggtacattgatgctgaa

SEQ ID NO: 4307 - RNA, 21 nt, synthetic construct
  source 1..21: mol_type = other RNA
ccaggtatggccatattactg

SEQ ID NO: 4308 - RNA, 21 nt, synthetic construct
  source 1..21: mol_type = other RNA
ccagtatggtattgcaggata

SEQ ID NO: 4309 - RNA, 21 nt, synthetic construct
  source 1..21: mol_type = other RNA
ccagtcacactgttagtaaat

SEQ ID NO: 4310 - RNA, 21 nt, synthetic construct
  source 1..21: mol_type = other RNA
ccatacaccttcttcatgcca

SEQ ID NO: 4311 - RNA, 21 nt, synthetic construct
  source 1..21: mol_type = other RNA
ccatacaggaatgggatgtct

SEQ ID NO: 4312 - RNA, 21 nt, synthetic construct
  source 1..21: mol_type = other RNA
ccatacctggggccatacacc

SEQ ID NO: 4313 - RNA, 21 nt, synthetic construct
  source 1..21: mol_type = other RNA
ccatactggcagttcctttgc

SEQ ID NO: 4314 - RNA, 21 nt, synthetic construct
  source 1..21: mol_type = other RNA
ccatattactgaccctctaca

SEQ ID NO: 4315 - RNA, 21 nt, synthetic construct
  source 1..21: mol_type = other RNA
ccatgtagcctatgcgtgtag

SEQ ID NO: 4316 - RNA, 21 nt, synthetic construct
  source 1..21: mol_type = other RNA
ccattcaaatctcctgttata

SEQ ID NO: 4317 - RNA, 21 nt, synthetic construct
  source 1..21: mol_type = other RNA
ccattcctgtatggggactgt

SEQ ID NO: 4318 - RNA, 21 nt, synthetic construct
  source 1..21: mol_type = other RNA
ccatttccacattggacatct

SEQ ID NO: 4319 - RNA, 21 nt, synthetic construct
  source 1..21: mol_type = other RNA
cccaaatcaattccctgttct

SEQ ID NO: 4320 - RNA, 21 nt, synthetic construct
  source 1..21: mol_type = other RNA
cccacagtattcagtacagta

SEQ ID NO: 4321 - RNA, 21 nt, synthetic construct
  source 1..21: mol_type = other RNA
cccacattacctgcaaggctt

SEQ ID NO: 4322 - RNA, 21 nt, synthetic construct
  source 1..21: mol_type = other RNA
cccaggccactagaggagata

SEQ ID NO: 4323 - RNA, 21 nt, synthetic construct
  source 1..21: mol_type = other RNA
cccagggtacattgatgctga

SEQ ID NO: 4324 - RNA, 21 nt, synthetic construct
  source 1..21: mol_type = other RNA
cccaggtatggccatattact

SEQ ID NO: 4325 - RNA, 21 nt, synthetic construct
  source 1..21: mol_type = other RNA
cccagtcacactgttagtaaa

SEQ ID NO: 4326 - RNA, 21 nt, synthetic construct
  source 1..21: mol_type = other RNA
cccatacaggaatgggatgtc

SEQ ID NO: 4327 - RNA, 21 nt, synthetic construct
  source 1..21: mol_type = other RNA
cccattcaaatctcctgttat

SEQ ID NO: 4328 - RNA, 21 nt, synthetic construct
  source 1..21: mol_type = other RNA
cccattcctgtatggggactg

SEQ ID NO: 4329 - RNA, 21 nt, synthetic construct
  source 1..21: mol_type = other RNA
ccccaggtatggccatattac

SEQ ID NO: 4330 - RNA, 21 nt, synthetic construct
  source 1..21: mol_type = other RNA
ccccatacaggaatgggatgt

SEQ ID NO: 4331 - RNA, 21 nt, synthetic construct
  source 1..21: mol_type = other RNA
ccccattcaaatctcctgtta

SEQ ID NO: 4332 - RNA, 21 nt, synthetic construct
  source 1..21: mol_type = other RNA
ccccgtcattaagtaacacat

SEQ ID NO: 4333 - RNA, 21 nt, synthetic construct
  source 1..21: mol_type = other RNA
cccgtcattaagtaacacatg

SEQ ID NO: 4334 - RNA, 21 nt, synthetic construct
  source 1..21: mol_type = other RNA
ccctcactatgtggagaacat

SEQ ID NO: 4335 - RNA, 21 nt, synthetic construct
  source 1..21: mol_type = other RNA
ccctctacagagagggcaaag

SEQ ID NO: 4336 - RNA, 21 nt, synthetic construct
  source 1..21: mol_type = other RNA
ccctctctcttgcttctggag

SEQ ID NO: 4337 - RNA, 21 nt, synthetic construct
  source 1..21: mol_type = other RNA
ccctctctgtagagggtcagt

SEQ ID NO: 4338 - RNA, 21 nt, synthetic construct
  source 1..21: mol_type = other RNA
ccctgctaaaatgttactctg

SEQ ID NO: 4339 - RNA, 21 nt, synthetic construct
  source 1..21: mol_type = other RNA
ccctgggcagtagaatttcat

SEQ ID NO: 4340 - RNA, 21 nt, synthetic construct
  source 1..21: mol_type = other RNA
ccctgtaggattcttctttcc

SEQ ID NO: 4341 - RNA, 21 nt, synthetic construct
  source 1..21: mol_type = other RNA
ccctgttctagaatataacag

SEQ ID NO: 4342 - RNA, 21 nt, synthetic construct
  source 1..21: mol_type = other RNA
cccttctcctgtggagtggca

SEQ ID NO: 4343 - RNA, 21 nt, synthetic construct
  source 1..21: mol_type = other RNA
ccctttatctcctctagtggc

SEQ ID NO: 4344 - RNA, 21 nt, synthetic construct
  source 1..21: mol_type = other RNA
ccgtcattaagtaacacatga

SEQ ID NO: 4345 - RNA, 21 nt, synthetic construct
  source 1..21: mol_type = other RNA
cctacagggtcatgttccctt

SEQ ID NO: 4346 - RNA, 21 nt, synthetic construct
  source 1..21: mol_type = other RNA
cctactacacgcataggctac

SEQ ID NO: 4347 - RNA, 21 nt, synthetic construct
  source 1..21: mol_type = other RNA
cctagactacaaacctgtaca

SEQ ID NO: 4348 - RNA, 21 nt, synthetic construct
  source 1..21: mol_type = other RNA
cctaggtgttgtagcctacta

SEQ ID NO: 4349 - RNA, 21 nt, synthetic construct
  source 1..21: mol_type = other RNA
cctaggtttgtgtaagcattt

SEQ ID NO: 4350 - RNA, 21 nt, synthetic construct
  source 1..21: mol_type = other RNA
cctatgcgtgtagtaggctac

SEQ ID NO: 4351 - RNA, 21 nt, synthetic construct
  source 1..21: mol_type = other RNA
cctcactatgtggagaacatt

SEQ ID NO: 4352 - RNA, 21 nt, synthetic construct
  source 1..21: mol_type = other RNA
cctcagcagagatgtccaatg

SEQ ID NO: 4353 - RNA, 21 nt, synthetic construct
  source 1..21: mol_type = other RNA
cctcaggacagtgaaacaaaa

SEQ ID NO: 4354 - RNA, 21 nt, synthetic construct
  source 1..21: mol_type = other RNA
cctccctctctcttgcttctg

SEQ ID NO: 4355 - RNA, 21 nt, synthetic construct
  source 1..21: mol_type = other RNA
cctctaagaggcaaacacagt

SEQ ID NO: 4356 - RNA, 21 nt, synthetic construct
  source 1..21: mol_type = other RNA
cctctacagagagggcaaagg

SEQ ID NO: 4357 - RNA, 21 nt, synthetic construct
  source 1..21: mol_type = other RNA
cctctagtggcctgggaacct

SEQ ID NO: 4358 - RNA, 21 nt, synthetic construct
  source 1..21: mol_type = other RNA
cctctctcttgcttctggagc

SEQ ID NO: 4359 - RNA, 21 nt, synthetic construct
  source 1..21: mol_type = other RNA
cctctctgtagagggtcagta

SEQ ID NO: 4360 - RNA, 21 nt, synthetic construct
  source 1..21: mol_type = other RNA
cctctcttctgtctgaagaat

SEQ ID NO: 4361 - RNA, 21 nt, synthetic construct
  source 1..21: mol_type = other RNA
cctcttagaggttcccaggcc

SEQ ID NO: 4362 - RNA, 21 nt, synthetic construct
  source 1..21: mol_type = other RNA
cctgaactctaatatagtcat

SEQ ID NO: 4363 - RNA, 21 nt, synthetic construct
  source 1..21: mol_type = other RNA
cctgaggactatttatagaca

SEQ ID NO: 4364 - RNA, 21 nt, synthetic construct
  source 1..21: mol_type = other RNA
cctgatgctctcccaaatcaa

SEQ ID NO: 4365 - RNA, 21 nt, synthetic construct
  source 1..21: mol_type = other RNA
cctgcaaggctttgatctttc

SEQ ID NO: 4366 - RNA, 21 nt, synthetic construct
  source 1..21: mol_type = other RNA
cctgcaataccatactggcag

SEQ ID NO: 4367 - RNA, 21 nt, synthetic construct
  source 1..21: mol_type = other RNA
cctgcctttatcctgcaatac

SEQ ID NO: 4368 - RNA, 21 nt, synthetic construct
  source 1..21: mol_type = other RNA
cctgctaaaatgttactctgt

SEQ ID NO: 4369 - RNA, 21 nt, synthetic construct
  source 1..21: mol_type = other RNA
cctggctctacaatttactaa

SEQ ID NO: 4370 - RNA, 21 nt, synthetic construct
  source 1..21: mol_type = other RNA
cctgggaacctctaagaggca

SEQ ID NO: 4371 - RNA, 21 nt, synthetic construct
  source 1..21: mol_type = other RNA
cctgggcagtagaatttcatt

SEQ ID NO: 4372 - RNA, 21 nt, synthetic construct
  source 1..21: mol_type = other RNA
cctggggccatacaccttctt

SEQ ID NO: 4373 - RNA, 21 nt, synthetic construct
  source 1..21: mol_type = other RNA
cctgtaggattcttctttccc

SEQ ID NO: 4374 - RNA, 21 nt, synthetic construct
  source 1..21: mol_type = other RNA
cctgtatggggactgtgtttg

SEQ ID NO: 4375 - RNA, 21 nt, synthetic construct
  source 1..21: mol_type = other RNA
cctgtggagtggcatgaagaa

SEQ ID NO: 4376 - RNA, 21 nt, synthetic construct
  source 1..21: mol_type = other RNA
cctgttactgtactgaatact

SEQ ID NO: 4377 - RNA, 21 nt, synthetic construct
  source 1..21: mol_type = other RNA
cctgttatattctagaacagg

SEQ ID NO: 4378 - RNA, 21 nt, synthetic construct
  source 1..21: mol_type = other RNA
cctgttctagaatataacagg

SEQ ID NO: 4379 - RNA, 21 nt, synthetic construct
  source 1..21: mol_type = other RNA
ccttcctgatgctctcccaaa

SEQ ID NO: 4380 - RNA, 21 nt, synthetic construct
  source 1..21: mol_type = other RNA
ccttctcctgtggagtggcat

SEQ ID NO: 4381 - RNA, 21 nt, synthetic construct
  source 1..21: mol_type = other RNA
ccttcttcatgccactccaca

SEQ ID NO: 4382 - RNA, 21 nt, synthetic construct
  source 1..21: mol_type = other RNA
ccttgagaaaatgtttttgtt

SEQ ID NO: 4383 - RNA, 21 nt, synthetic construct
  source 1..21: mol_type = other RNA
ccttgcaggtaatgtgggtaa

SEQ ID NO: 4384 - RNA, 21 nt, synthetic construct
  source 1..21: mol_type = other RNA
ccttgtagttacatctattat

SEQ ID NO: 4385 - RNA, 21 nt, synthetic construct
  source 1..21: mol_type = other RNA
cctttatcctgcaataccata

SEQ ID NO: 4386 - RNA, 21 nt, synthetic construct
  source 1..21: mol_type = other RNA
cctttatctcctctagtggcc

SEQ ID NO: 4387 - RNA, 21 nt, synthetic construct
  source 1..21: mol_type = other RNA
cctttgccctctctgtagagg

SEQ ID NO: 4388 - RNA, 21 nt, synthetic construct
  source 1..21: mol_type = other RNA
cctttggactccaactaaaga

SEQ ID NO: 4389 - RNA, 21 nt, synthetic construct
  source 1..21: mol_type = other RNA
cgcataggctacatggtatag

SEQ ID NO: 4390 - RNA, 21 nt, synthetic construct
  source 1..21: mol_type = other RNA
cggggacatgttctgagaaat

SEQ ID NO: 4391 - RNA, 21 nt, synthetic construct
  source 1..21: mol_type = other RNA
cgtcattaagtaacacatgac

SEQ ID NO: 4392 - RNA, 21 nt, synthetic construct
  source 1..21: mol_type = other RNA
cgtgtagtaggctacaacacc

SEQ ID NO: 4393 - RNA, 21 nt, synthetic construct
  source 1..21: mol_type = other RNA
ctaaaatgttactctgtcaat

SEQ ID NO: 4394 - RNA, 21 nt, synthetic construct
  source 1..21: mol_type = other RNA
ctaaagatgcagagaagtcca

SEQ ID NO: 4395 - RNA, 21 nt, synthetic construct
  source 1..21: mol_type = other RNA
ctaacagtgtgactgggcaga

SEQ ID NO: 4396 - RNA, 21 nt, synthetic construct
  source 1..21: mol_type = other RNA
ctaacatgataaccctcacta

SEQ ID NO: 4397 - RNA, 21 nt, synthetic construct
  source 1..21: mol_type = other RNA
ctaagaggcaaacacagtccc

SEQ ID NO: 4398 - RNA, 21 nt, synthetic construct
  source 1..21: mol_type = other RNA
ctaatatagtcatgtgttact

SEQ ID NO: 4399 - RNA, 21 nt, synthetic construct
  source 1..21: mol_type = other RNA
ctacaacacctaggtttgtgt

SEQ ID NO: 4400 - RNA, 21 nt, synthetic construct
  source 1..21: mol_type = other RNA
ctacaaggagctccagaagca

SEQ ID NO: 4401 - RNA, 21 nt, synthetic construct
  source 1..21: mol_type = other RNA
ctacaatttactaacagtgtg

SEQ ID NO: 4402 - RNA, 21 nt, synthetic construct
  source 1..21: mol_type = other RNA
ctacacgcataggctacatgg

SEQ ID NO: 4403 - RNA, 21 nt, synthetic construct
  source 1..21: mol_type = other RNA
ctacagagagggcaaaggaac

SEQ ID NO: 4404 - RNA, 21 nt, synthetic construct
  source 1..21: mol_type = other RNA
ctacagggtcatgttcccttc

SEQ ID NO: 4405 - RNA, 21 nt, synthetic construct
  source 1..21: mol_type = other RNA
ctacatggtatagcctattgc

SEQ ID NO: 4406 - RNA, 21 nt, synthetic construct
  source 1..21: mol_type = other RNA
ctactacacgcataggctaca

SEQ ID NO: 4407 - RNA, 21 nt, synthetic construct
  source 1..21: mol_type = other RNA
ctactgcccagggtacattga

SEQ ID NO: 4408 - RNA, 21 nt, synthetic construct
  source 1..21: mol_type = other RNA
ctagaacagggaattgatttg

SEQ ID NO: 4409 - RNA, 21 nt, synthetic construct
  source 1..21: mol_type = other RNA
ctagaatataacaggagattt

SEQ ID NO: 4410 - RNA, 21 nt, synthetic construct
  source 1..21: mol_type = other RNA
ctagactacaaacctgtacag

SEQ ID NO: 4411 - RNA, 21 nt, synthetic construct
  source 1..21: mol_type = other RNA
ctagaggagataaagggaaac

SEQ ID NO: 4412 - RNA, 21 nt, synthetic construct
  source 1..21: mol_type = other RNA
ctaggtgttgtagcctactac

SEQ ID NO: 4413 - RNA, 21 nt, synthetic construct
  source 1..21: mol_type = other RNA
ctaggtttgtgtaagcatttc

SEQ ID NO: 4414 - RNA, 21 nt, synthetic construct
  source 1..21: mol_type = other RNA
ctagtggcctgggaacctcta

SEQ ID NO: 4415 - RNA, 21 nt, synthetic construct
  source 1..21: mol_type = other RNA
ctataaatagtcctcaggaca

SEQ ID NO: 4416 - RNA, 21 nt, synthetic construct
  source 1..21: mol_type = other RNA
ctataccatgtagcctatgcg

SEQ ID NO: 4417 - RNA, 21 nt, synthetic construct
  source 1..21: mol_type = other RNA
ctatattagagttcaggtcct

SEQ ID NO: 4418 - RNA, 21 nt, synthetic construct
  source 1..21: mol_type = other RNA
ctatgcgtgtagtaggctaca

SEQ ID NO: 4419 - RNA, 21 nt, synthetic construct
  source 1..21: mol_type = other RNA
ctatgtggagaacattgacag

SEQ ID NO: 4420 - RNA, 21 nt, synthetic construct
  source 1..21: mol_type = other RNA
ctatttatagacagctctaac

SEQ ID NO: 4421 - RNA, 21 nt, synthetic construct
  source 1..21: mol_type = other RNA
ctcactatgtggagaacattg

SEQ ID NO: 4422 - RNA, 21 nt, synthetic construct
  source 1..21: mol_type = other RNA
ctcagaacatgtccccgtcat

SEQ ID NO: 4423 - RNA, 21 nt, synthetic construct
  source 1..21: mol_type = other RNA
ctcagcagagatgtccaatgt

SEQ ID NO: 4424 - RNA, 21 nt, synthetic construct
  source 1..21: mol_type = other RNA
ctcaggacagtgaaacaaaaa

SEQ ID NO: 4425 - RNA, 21 nt, synthetic construct
  source 1..21: mol_type = other RNA
ctccaactaaagatgcagaga

SEQ ID NO: 4426 - RNA, 21 nt, synthetic construct
  source 1..21: mol_type = other RNA
ctccacaggagaagggaacat

SEQ ID NO: 4427 - RNA, 21 nt, synthetic construct
  source 1..21: mol_type = other RNA
ctccacatagtgagggttatc

SEQ ID NO: 4428 - RNA, 21 nt, synthetic construct
  source 1..21: mol_type = other RNA
ctccagaagcaagagagaggg

SEQ ID NO: 4429 - RNA, 21 nt, synthetic construct
  source 1..21: mol_type = other RNA
ctcccaaatcaattccctgtt

SEQ ID NO: 4430 - RNA, 21 nt, synthetic construct
  source 1..21: mol_type = other RNA
ctccctctctcttgcttctgg

SEQ ID NO: 4431 - RNA, 21 nt, synthetic construct
  source 1..21: mol_type = other RNA
ctcctagactacaaacctgta

SEQ ID NO: 4432 - RNA, 21 nt, synthetic construct
  source 1..21: mol_type = other RNA
ctcctcagcagagatgtccaa

SEQ ID NO: 4433 - RNA, 21 nt, synthetic construct
  source 1..21: mol_type = other RNA
ctcctctagtggcctgggaac

SEQ ID NO: 4434 - RNA, 21 nt, synthetic construct
  source 1..21: mol_type = other RNA
ctcctctcttctgtctgaaga

SEQ ID NO: 4435 - RNA, 21 nt, synthetic construct
  source 1..21: mol_type = other RNA
ctcctgtggagtggcatgaag

SEQ ID NO: 4436 - RNA, 21 nt, synthetic construct
  source 1..21: mol_type = other RNA
ctcctgttatattctagaaca

SEQ ID NO: 4437 - RNA, 21 nt, synthetic construct
  source 1..21: mol_type = other RNA
ctccttgtagttacatctatt

SEQ ID NO: 4438 - RNA, 21 nt, synthetic construct
  source 1..21: mol_type = other RNA
ctctaacatgataaccctcac

SEQ ID NO: 4439 - RNA, 21 nt, synthetic construct
  source 1..21: mol_type = other RNA
ctctaagaggcaaacacagtc

SEQ ID NO: 4440 - RNA, 21 nt, synthetic construct
  source 1..21: mol_type = other RNA
ctctaatatagtcatgtgtta

SEQ ID NO: 4441 - RNA, 21 nt, synthetic construct
  source 1..21: mol_type = other RNA
ctctacaatttactaacagtg

SEQ ID NO: 4442 - RNA, 21 nt, synthetic construct
  source 1..21: mol_type = other RNA
ctctacagagagggcaaagga

SEQ ID NO: 4443 - RNA, 21 nt, synthetic construct
  source 1..21: mol_type = other RNA
ctctagtggcctgggaacctc

SEQ ID NO: 4444 - RNA, 21 nt, synthetic construct
  source 1..21: mol_type = other RNA
ctctcccaaatcaattccctg

SEQ ID NO: 4445 - RNA, 21 nt, synthetic construct
  source 1..21: mol_type = other RNA
ctctcctcagcagagatgtcc

SEQ ID NO: 4446 - RNA, 21 nt, synthetic construct
  source 1..21: mol_type = other RNA
ctctctcttgcttctggagct

SEQ ID NO: 4447 - RNA, 21 nt, synthetic construct
  source 1..21: mol_type = other RNA
ctctctgtagagggtcagtaa

SEQ ID NO: 4448 - RNA, 21 nt, synthetic construct
  source 1..21: mol_type = other RNA
ctctcttctgtctgaagaata

SEQ ID NO: 4449 - RNA, 21 nt, synthetic construct
  source 1..21: mol_type = other RNA
ctctcttgcttctggagctcc

SEQ ID NO: 4450 - RNA, 21 nt, synthetic construct
  source 1..21: mol_type = other RNA
ctctgcagacatcccattcct

SEQ ID NO: 4451 - RNA, 21 nt, synthetic construct
  source 1..21: mol_type = other RNA
ctctgcatctttagttggagt

SEQ ID NO: 4452 - RNA, 21 nt, synthetic construct
  source 1..21: mol_type = other RNA
ctctgctgaggagagaaaatg

SEQ ID NO: 4453 - RNA, 21 nt, synthetic construct
  source 1..21: mol_type = other RNA
ctctgtagagggtcagtaata

SEQ ID NO: 4454 - RNA, 21 nt, synthetic construct
  source 1..21: mol_type = other RNA
ctctgtcaatgttctccacat

SEQ ID NO: 4455 - RNA, 21 nt, synthetic construct
  source 1..21: mol_type = other RNA
ctcttagaggttcccaggcca

SEQ ID NO: 4456 - RNA, 21 nt, synthetic construct
  source 1..21: mol_type = other RNA
ctcttctgtctgaagaataaa

SEQ ID NO: 4457 - RNA, 21 nt, synthetic construct
  source 1..21: mol_type = other RNA
ctcttgcttctggagctcctt

SEQ ID NO: 4458 - RNA, 21 nt, synthetic construct
  source 1..21: mol_type = other RNA
ctcttttcctttgtataatgt

SEQ ID NO: 4459 - RNA, 21 nt, synthetic construct
  source 1..21: mol_type = other RNA
ctgaaaccccattcaaatctc

SEQ ID NO: 4460 - RNA, 21 nt, synthetic construct
  source 1..21: mol_type = other RNA
ctgaactctaatatagtcatg

SEQ ID NO: 4461 - RNA, 21 nt, synthetic construct
  source 1..21: mol_type = other RNA
ctgaccctctacagagagggc

SEQ ID NO: 4462 - RNA, 21 nt, synthetic construct
  source 1..21: mol_type = other RNA
ctgagaaatgcttacacaaac

SEQ ID NO: 4463 - RNA, 21 nt, synthetic construct
  source 1..21: mol_type = other RNA
ctgaggactatttatagacag

SEQ ID NO: 4464 - RNA, 21 nt, synthetic construct
  source 1..21: mol_type = other RNA
ctgaggagagaaaatgaacca

SEQ ID NO: 4465 - RNA, 21 nt, synthetic construct
  source 1..21: mol_type = other RNA
ctgatgctctcccaaatcaat

SEQ ID NO: 4466 - RNA, 21 nt, synthetic construct
  source 1..21: mol_type = other RNA
ctgcaaggctttgatctttct

SEQ ID NO: 4467 - RNA, 21 nt, synthetic construct
  source 1..21: mol_type = other RNA
ctgcaataccatactggcagt

SEQ ID NO: 4468 - RNA, 21 nt, synthetic construct
  source 1..21: mol_type = other RNA
ctgcagacatcccattcctgt

SEQ ID NO: 4469 - RNA, 21 nt, synthetic construct
  source 1..21: mol_type = other RNA
ctgcagagctgtataactcct

SEQ ID NO: 4470 - RNA, 21 nt, synthetic construct
  source 1..21: mol_type = other RNA
ctgcatctttagttggagtcc

SEQ ID NO: 4471 - RNA, 21 nt, synthetic construct
  source 1..21: mol_type = other RNA
ctgccagtatggtattgcagg

SEQ ID NO: 4472 - RNA, 21 nt, synthetic construct
  source 1..21: mol_type = other RNA
ctgccatttccacattggaca

SEQ ID NO: 4473 - RNA, 21 nt, synthetic construct
  source 1..21: mol_type = other RNA
ctgcccacagtattcagtaca

SEQ ID NO: 4474 - RNA, 21 nt, synthetic construct
  source 1..21: mol_type = other RNA
ctgcccagggtacattgatgc

SEQ ID NO: 4475 - RNA, 21 nt, synthetic construct
  source 1..21: mol_type = other RNA
ctgcccagtcacactgttagt

SEQ ID NO: 4476 - RNA, 21 nt, synthetic construct
  source 1..21: mol_type = other RNA
ctgcctttatcctgcaatacc

SEQ ID NO: 4477 - RNA, 21 nt, synthetic construct
  source 1..21: mol_type = other RNA
ctgctaaaatgttactctgtc

SEQ ID NO: 4478 - RNA, 21 nt, synthetic construct
  source 1..21: mol_type = other RNA
ctgctgaggagagaaaatgaa

SEQ ID NO: 4479 - RNA, 21 nt, synthetic construct
  source 1..21: mol_type = other RNA
ctggagctccttgtagttaca

SEQ ID NO: 4480 - RNA, 21 nt, synthetic construct
  source 1..21: mol_type = other RNA
ctggcagttcctttgccctct

SEQ ID NO: 4481 - RNA, 21 nt, synthetic construct
  source 1..21: mol_type = other RNA
ctggctctacaatttactaac

SEQ ID NO: 4482 - RNA, 21 nt, synthetic construct
  source 1..21: mol_type = other RNA
ctgggaacctctaagaggcaa

SEQ ID NO: 4483 - RNA, 21 nt, synthetic construct
  source 1..21: mol_type = other RNA
ctgggcagatcatccaccttc

SEQ ID NO: 4484 - RNA, 21 nt, synthetic construct
  source 1..21: mol_type = other RNA
ctgggcagtagaatttcattg

SEQ ID NO: 4485 - RNA, 21 nt, synthetic construct
  source 1..21: mol_type = other RNA
ctggggccatacaccttcttc

SEQ ID NO: 4486 - RNA, 21 nt, synthetic construct
  source 1..21: mol_type = other RNA
ctgtagagggtcagtaatatg

SEQ ID NO: 4487 - RNA, 21 nt, synthetic construct
  source 1..21: mol_type = other RNA
ctgtaggattcttctttccct

SEQ ID NO: 4488 - RNA, 21 nt, synthetic construct
  source 1..21: mol_type = other RNA
ctgtataactcctctcttctg

SEQ ID NO: 4489 - RNA, 21 nt, synthetic construct
  source 1..21: mol_type = other RNA
ctgtatggggactgtgtttgc

SEQ ID NO: 4490 - RNA, 21 nt, synthetic construct
  source 1..21: mol_type = other RNA
ctgtcaatgttctccacatag

SEQ ID NO: 4491 - RNA, 21 nt, synthetic construct
  source 1..21: mol_type = other RNA
ctgtcctgaggactatttata

SEQ ID NO: 4492 - RNA, 21 nt, synthetic construct
  source 1..21: mol_type = other RNA
ctgtctataaatagtcctcag

SEQ ID NO: 4493 - RNA, 21 nt, synthetic construct
  source 1..21: mol_type = other RNA
ctgtctgaagaataaaacaac

SEQ ID NO: 4494 - RNA, 21 nt, synthetic construct
  source 1..21: mol_type = other RNA
ctgtggagtggcatgaagaag

SEQ ID NO: 4495 - RNA, 21 nt, synthetic construct
  source 1..21: mol_type = other RNA
ctgtgtttgcctcttagaggt

SEQ ID NO: 4496 - RNA, 21 nt, synthetic construct
  source 1..21: mol_type = other RNA
ctgttactgtactgaatactg

SEQ ID NO: 4497 - RNA, 21 nt, synthetic construct
  source 1..21: mol_type = other RNA
ctgttagtaaattgtagagcc

SEQ ID NO: 4498 - RNA, 21 nt, synthetic construct
  source 1..21: mol_type = other RNA
ctgttatattctagaacaggg

SEQ ID NO: 4499 - RNA, 21 nt, synthetic construct
  source 1..21: mol_type = other RNA
ctgttctagaatataacagga

SEQ ID NO: 4500 - RNA, 21 nt, synthetic construct
  source 1..21: mol_type = other RNA
ctgtttccctttatctcctct

SEQ ID NO: 4501 - RNA, 21 nt, synthetic construct
  source 1..21: mol_type = other RNA
cttaatgacggggacatgttc

SEQ ID NO: 4502 - RNA, 21 nt, synthetic construct
  source 1..21: mol_type = other RNA
cttacacaaacctaggtgttg

SEQ ID NO: 4503 - RNA, 21 nt, synthetic construct
  source 1..21: mol_type = other RNA
cttagaggttcccaggccact

SEQ ID NO: 4504 - RNA, 21 nt, synthetic construct
  source 1..21: mol_type = other RNA
cttcagacagaagagaggagt

SEQ ID NO: 4505 - RNA, 21 nt, synthetic construct
  source 1..21: mol_type = other RNA
cttcatgccactccacaggag

SEQ ID NO: 4506 - RNA, 21 nt, synthetic construct
  source 1..21: mol_type = other RNA
cttcctgatgctctcccaaat

SEQ ID NO: 4507 - RNA, 21 nt, synthetic construct
  source 1..21: mol_type = other RNA
cttctcctgtggagtggcatg

SEQ ID NO: 4508 - RNA, 21 nt, synthetic construct
  source 1..21: mol_type = other RNA
cttctctgcatctttagttgg

SEQ ID NO: 4509 - RNA, 21 nt, synthetic construct
  source 1..21: mol_type = other RNA
cttctgccatttccacattgg

SEQ ID NO: 4510 - RNA, 21 nt, synthetic construct
  source 1..21: mol_type = other RNA
cttctggagctccttgtagtt

SEQ ID NO: 4511 - RNA, 21 nt, synthetic construct
  source 1..21: mol_type = other RNA
cttctgtctgaagaataaaac

SEQ ID NO: 4512 - RNA, 21 nt, synthetic construct
  source 1..21: mol_type = other RNA
cttcttcatgccactccacag

SEQ ID NO: 4513 - RNA, 21 nt, synthetic construct
  source 1..21: mol_type = other RNA
cttctttccctgctaaaatgt

SEQ ID NO: 4514 - RNA, 21 nt, synthetic construct
  source 1..21: mol_type = other RNA
cttgcaggtaatgtgggtaac

SEQ ID NO: 4515 - RNA, 21 nt, synthetic construct
  source 1..21: mol_type = other RNA
cttgcttctggagctccttgt

SEQ ID NO: 4516 - RNA, 21 nt, synthetic construct
  source 1..21: mol_type = other RNA
cttggacttctctgcatcttt

SEQ ID NO: 4517 - RNA, 21 nt, synthetic construct
  source 1..21: mol_type = other RNA
ctttagttggagtccaaaggc

SEQ ID NO: 4518 - RNA, 21 nt, synthetic construct
  source 1..21: mol_type = other RNA
ctttatcctgcaataccatac

SEQ ID NO: 4519 - RNA, 21 nt, synthetic construct
  source 1..21: mol_type = other RNA
ctttatctcctctagtggcct

SEQ ID NO: 4520 - RNA, 21 nt, synthetic construct
  source 1..21: mol_type = other RNA
ctttccctgctaaaatgttac

SEQ ID NO: 4521 - RNA, 21 nt, synthetic construct
  source 1..21: mol_type = other RNA
ctttcttctgccatttccaca

SEQ ID NO: 4522 - RNA, 21 nt, synthetic construct
  source 1..21: mol_type = other RNA
ctttgatctttcttctgccat

SEQ ID NO: 4523 - RNA, 21 nt, synthetic construct
  source 1..21: mol_type = other RNA
ctttgccctctctgtagaggg

SEQ ID NO: 4524 - RNA, 21 nt, synthetic construct
  source 1..21: mol_type = other RNA
ctttggactccaactaaagat

SEQ ID NO: 4525 - RNA, 21 nt, synthetic construct
  source 1..21: mol_type = other RNA
cttttcaatgaaattctactg

SEQ ID NO: 4526 - RNA, 21 nt, synthetic construct
  source 1..21: mol_type = other RNA
cttttcctttgtataatgttg

SEQ ID NO: 4527 - RNA, 21 nt, synthetic construct
  source 1..21: mol_type = other RNA
gaaaagagtggttcattttct

SEQ ID NO: 4528 - RNA, 21 nt, synthetic construct
  source 1..21: mol_type = other RNA
gaaaagcctttggactccaac

SEQ ID NO: 4529 - RNA, 21 nt, synthetic construct
  source 1..21: mol_type = other RNA
gaaaatgaaccactcttttcc

SEQ ID NO: 4530 - RNA, 21 nt, synthetic construct
  source 1..21: mol_type = other RNA
gaaaatgtttttgtttcactg

SEQ ID NO: 4531 - RNA, 21 nt, synthetic construct
  source 1..21: mol_type = other RNA
gaaacagattgttataacttg

SEQ ID NO: 4532 - RNA, 21 nt, synthetic construct
  source 1..21: mol_type = other RNA
gaaaccccattcaaatctcct

SEQ ID NO: 4533 - RNA, 21 nt, synthetic construct
  source 1..21: mol_type = other RNA
gaaagaagaatcctacagggt

SEQ ID NO: 4534 - RNA, 21 nt, synthetic construct
  source 1..21: mol_type = other RNA
gaaagatcaaagccttgcagg

SEQ ID NO: 4535 - RNA, 21 nt, synthetic construct
  source 1..21: mol_type = other RNA
gaaatgcttacacaaacctag

SEQ ID NO: 4536 - RNA, 21 nt, synthetic construct
  source 1..21: mol_type = other RNA
gaaatggcagaagaaagatca

SEQ ID NO: 4537 - RNA, 21 nt, synthetic construct
  source 1..21: mol_type = other RNA
gaaattctactgcccagggta

SEQ ID NO: 4538 - RNA, 21 nt, synthetic construct
  source 1..21: mol_type = other RNA
gaacagggaattgatttggga

SEQ ID NO: 4539 - RNA, 21 nt, synthetic construct
  source 1..21: mol_type = other RNA
gaacatgaccctgtaggattc

SEQ ID NO: 4540 - RNA, 21 nt, synthetic construct
  source 1..21: mol_type = other RNA
gaacatgtccccgtcattaag

SEQ ID NO: 4541 - RNA, 21 nt, synthetic construct
  source 1..21: mol_type = other RNA
gaacattgacagagtaacatt

SEQ ID NO: 4542 - RNA, 21 nt, synthetic construct
  source 1..21: mol_type = other RNA
gaaccactcttttcctttgta

SEQ ID NO: 4543 - RNA, 21 nt, synthetic construct
  source 1..21: mol_type = other RNA
gaacctctaagaggcaaacac

SEQ ID NO: 4544 - RNA, 21 nt, synthetic construct
  source 1..21: mol_type = other RNA
gaactctaatatagtcatgtg

SEQ ID NO: 4545 - RNA, 21 nt, synthetic construct
  source 1..21: mol_type = other RNA
gaactgccagtatggtattgc

SEQ ID NO: 4546 - RNA, 21 nt, synthetic construct
  source 1..21: mol_type = other RNA
gaacttggacttctctgcatc

SEQ ID NO: 4547 - RNA, 21 nt, synthetic construct
  source 1..21: mol_type = other RNA
gaagaaagatcaaagccttgc

SEQ ID NO: 4548 - RNA, 21 nt, synthetic construct
  source 1..21: mol_type = other RNA
gaagaaggtgtatggccccag

SEQ ID NO: 4549 - RNA, 21 nt, synthetic construct
  source 1..21: mol_type = other RNA
gaagaatcctacagggtcatg

SEQ ID NO: 4550 - RNA, 21 nt, synthetic construct
  source 1..21: mol_type = other RNA
gaagagaggagttatacagct

SEQ ID NO: 4551 - RNA, 21 nt, synthetic construct
  source 1..21: mol_type = other RNA
gaagcaagagagagggaggaa

SEQ ID NO: 4552 - RNA, 21 nt, synthetic construct
  source 1..21: mol_type = other RNA
gaagggaacatgaccctgtag

SEQ ID NO: 4553 - RNA, 21 nt, synthetic construct
  source 1..21: mol_type = other RNA
gaaggtggatgatctgcccag

SEQ ID NO: 4554 - RNA, 21 nt, synthetic construct
  source 1..21: mol_type = other RNA
gaaggtgtatggccccaggta

SEQ ID NO: 4555 - RNA, 21 nt, synthetic construct
  source 1..21: mol_type = other RNA
gaagtccaagttcctccctct

SEQ ID NO: 4556 - RNA, 21 nt, synthetic construct
  source 1..21: mol_type = other RNA
gaatataacaggagatttgaa

SEQ ID NO: 4557 - RNA, 21 nt, synthetic construct
  source 1..21: mol_type = other RNA
gaatcctacagggtcatgttc

SEQ ID NO: 4558 - RNA, 21 nt, synthetic construct
  source 1..21: mol_type = other RNA
gaatgggatgtctgcagagct

SEQ ID NO: 4559 - RNA, 21 nt, synthetic construct
  source 1..21: mol_type = other RNA
gaatggggtttcagcatcaat

SEQ ID NO: 4560 - RNA, 21 nt, synthetic construct
  source 1..21: mol_type = other RNA
gaattgatttgggagagcatc

SEQ ID NO: 4561 - RNA, 21 nt, synthetic construct
  source 1..21: mol_type = other RNA
gaatttcattgaaaagccttt

SEQ ID NO: 4562 - RNA, 21 nt, synthetic construct
  source 1..21: mol_type = other RNA
gacagaagagaggagttatac

SEQ ID NO: 4563 - RNA, 21 nt, synthetic construct
  source 1..21: mol_type = other RNA
gacagagtaacattttagcag

SEQ ID NO: 4564 - RNA, 21 nt, synthetic construct
  source 1..21: mol_type = other RNA
gacagctctaacatgataacc

SEQ ID NO: 4565 - RNA, 21 nt, synthetic construct
  source 1..21: mol_type = other RNA
gacagtgaaacaaaaacattt

SEQ ID NO: 4566 - RNA, 21 nt, synthetic construct
  source 1..21: mol_type = other RNA
gacatcccattcctgtatggg

SEQ ID NO: 4567 - RNA, 21 nt, synthetic construct
  source 1..21: mol_type = other RNA
gacatctctgctgaggagaga

SEQ ID NO: 4568 - RNA, 21 nt, synthetic construct
  source 1..21: mol_type = other RNA
gacatgttctgagaaatgctt

SEQ ID NO: 4569 - RNA, 21 nt, synthetic construct
  source 1..21: mol_type = other RNA
gaccctctacagagagggcaa

SEQ ID NO: 4570 - RNA, 21 nt, synthetic construct
  source 1..21: mol_type = other RNA
gaccctgtaggattcttcttt

SEQ ID NO: 4571 - RNA, 21 nt, synthetic construct
  source 1..21: mol_type = other RNA
gacctgaactctaatatagtc

SEQ ID NO: 4572 - RNA, 21 nt, synthetic construct
  source 1..21: mol_type = other RNA
gaccttgagaaaatgtttttg

SEQ ID NO: 4573 - RNA, 21 nt, synthetic construct
  source 1..21: mol_type = other RNA
gacggggacatgttctgagaa

SEQ ID NO: 4574 - RNA, 21 nt, synthetic construct
  source 1..21: mol_type = other RNA
gactacaaacctgtacagcct

SEQ ID NO: 4575 - RNA, 21 nt, synthetic construct
  source 1..21: mol_type = other RNA
gactatattagagttcaggtc

SEQ ID NO: 4576 - RNA, 21 nt, synthetic construct
  source 1..21: mol_type = other RNA
gactatttatagacagctcta

SEQ ID NO: 4577 - RNA, 21 nt, synthetic construct
  source 1..21: mol_type = other RNA
gactccaactaaagatgcaga

SEQ ID NO: 4578 - RNA, 21 nt, synthetic construct
  source 1..21: mol_type = other RNA
gactgggcagatcatccacct

SEQ ID NO: 4579 - RNA, 21 nt, synthetic construct
  source 1..21: mol_type = other RNA
gactgtgtttgcctcttagag

SEQ ID NO: 4580 - RNA, 21 nt, synthetic construct
  source 1..21: mol_type = other RNA
gacttctctgcatctttagtt

SEQ ID NO: 4581 - RNA, 21 nt, synthetic construct
  source 1..21: mol_type = other RNA
gagaaaatgaaccactctttt

SEQ ID NO: 4582 - RNA, 21 nt, synthetic construct
  source 1..21: mol_type = other RNA
gagaaaatgtttttgtttcac

SEQ ID NO: 4583 - RNA, 21 nt, synthetic construct
  source 1..21: mol_type = other RNA
gagaaatgcttacacaaacct

SEQ ID NO: 4584 - RNA, 21 nt, synthetic construct
  source 1..21: mol_type = other RNA
gagaacattgacagagtaaca

SEQ ID NO: 4585 - RNA, 21 nt, synthetic construct
  source 1..21: mol_type = other RNA
gagaagggaacatgaccctgt

SEQ ID NO: 4586 - RNA, 21 nt, synthetic construct
  source 1..21: mol_type = other RNA
gagaagtccaagttcctccct

SEQ ID NO: 4587 - RNA, 21 nt, synthetic construct
  source 1..21: mol_type = other RNA
gagagaaaatgaaccactctt

SEQ ID NO: 4588 - RNA, 21 nt, synthetic construct
  source 1..21: mol_type = other RNA
gagagagggaggaacttggac

SEQ ID NO: 4589 - RNA, 21 nt, synthetic construct
  source 1..21: mol_type = other RNA
gagagcatcaggaaggtggat

SEQ ID NO: 4590 - RNA, 21 nt, synthetic construct
  source 1..21: mol_type = other RNA
gagaggagttatacagctctg

SEQ ID NO: 4591 - RNA, 21 nt, synthetic construct
  source 1..21: mol_type = other RNA
gagagggaggaacttggactt

SEQ ID NO: 4592 - RNA, 21 nt, synthetic construct
  source 1..21: mol_type = other RNA
gagagggcaaaggaactgcca

SEQ ID NO: 4593 - RNA, 21 nt, synthetic construct
  source 1..21: mol_type = other RNA
gagataaagggaaacagattg

SEQ ID NO: 4594 - RNA, 21 nt, synthetic construct
  source 1..21: mol_type = other RNA
gagatgtccaatgtggaaatg

SEQ ID NO: 4595 - RNA, 21 nt, synthetic construct
  source 1..21: mol_type = other RNA
gagatttgaatggggtttcag

SEQ ID NO: 4596 - RNA, 21 nt, synthetic construct
  source 1..21: mol_type = other RNA
gagcatcaggaaggtggatga

SEQ ID NO: 4597 - RNA, 21 nt, synthetic construct
  source 1..21: mol_type = other RNA
gagccaggacctgaactctaa

SEQ ID NO: 4598 - RNA, 21 nt, synthetic construct
  source 1..21: mol_type = other RNA
gagctccagaagcaagagaga

SEQ ID NO: 4599 - RNA, 21 nt, synthetic construct
  source 1..21: mol_type = other RNA
gagctccttgtagttacatct

SEQ ID NO: 4600 - RNA, 21 nt, synthetic construct
  source 1..21: mol_type = other RNA
gagctgtataactcctctctt

SEQ ID NO: 4601 - RNA, 21 nt, synthetic construct
  source 1..21: mol_type = other RNA
gagctgtctataaatagtcct

SEQ ID NO: 4602 - RNA, 21 nt, synthetic construct
  source 1..21: mol_type = other RNA
gaggaacttggacttctctgc

SEQ ID NO: 4603 - RNA, 21 nt, synthetic construct
  source 1..21: mol_type = other RNA
gaggactatttatagacagct

SEQ ID NO: 4604 - RNA, 21 nt, synthetic construct
  source 1..21: mol_type = other RNA
gaggagagaaaatgaaccact

SEQ ID NO: 4605 - RNA, 21 nt, synthetic construct
  source 1..21: mol_type = other RNA
gaggagataaagggaaacaga

SEQ ID NO: 4606 - RNA, 21 nt, synthetic construct
  source 1..21: mol_type = other RNA
gaggagttatacagctctgca

SEQ ID NO: 4607 - RNA, 21 nt, synthetic construct
  source 1..21: mol_type = other RNA
gaggcaaacacagtccccata

SEQ ID NO: 4608 - RNA, 21 nt, synthetic construct
  source 1..21: mol_type = other RNA
gagggaggaacttggacttct

SEQ ID NO: 4609 - RNA, 21 nt, synthetic construct
  source 1..21: mol_type = other RNA
gagggcaaaggaactgccagt

SEQ ID NO: 4610 - RNA, 21 nt, synthetic construct
  source 1..21: mol_type = other RNA
gagggtcagtaatatggccat

SEQ ID NO: 4611 - RNA, 21 nt, synthetic construct
  source 1..21: mol_type = other RNA
gagggttatcatgttagagct

SEQ ID NO: 4612 - RNA, 21 nt, synthetic construct
  source 1..21: mol_type = other RNA
gaggttcccaggccactagag

SEQ ID NO: 4613 - RNA, 21 nt, synthetic construct
  source 1..21: mol_type = other RNA
gagtaacattttagcagggaa

SEQ ID NO: 4614 - RNA, 21 nt, synthetic construct
  source 1..21: mol_type = other RNA
gagtccaaaggcttttcaatg

SEQ ID NO: 4615 - RNA, 21 nt, synthetic construct
  source 1..21: mol_type = other RNA
gagtggcatgaagaaggtgta

SEQ ID NO: 4616 - RNA, 21 nt, synthetic construct
  source 1..21: mol_type = other RNA
gagtggttcattttctctcct

SEQ ID NO: 4617 - RNA, 21 nt, synthetic construct
  source 1..21: mol_type = other RNA
gagttatacagctctgcagac

SEQ ID NO: 4618 - RNA, 21 nt, synthetic construct
  source 1..21: mol_type = other RNA
gagttcaggtcctggctctac

SEQ ID NO: 4619 - RNA, 21 nt, synthetic construct
  source 1..21: mol_type = other RNA
gataaaggcaggtggttaccc

SEQ ID NO: 4620 - RNA, 21 nt, synthetic construct
  source 1..21: mol_type = other RNA
gataaagggaaacagattgtt

SEQ ID NO: 4621 - RNA, 21 nt, synthetic construct
  source 1..21: mol_type = other RNA
gataaccctcactatgtggag

SEQ ID NO: 4622 - RNA, 21 nt, synthetic construct
  source 1..21: mol_type = other RNA
gatcaaagccttgcaggtaat

SEQ ID NO: 4623 - RNA, 21 nt, synthetic construct
  source 1..21: mol_type = other RNA
gatcatccaccttcctgatgc

SEQ ID NO: 4624 - RNA, 21 nt, synthetic construct
  source 1..21: mol_type = other RNA
gatctgcccagtcacactgtt

SEQ ID NO: 4625 - RNA, 21 nt, synthetic construct
  source 1..21: mol_type = other RNA
gatctttcttctgccatttcc

SEQ ID NO: 4626 - RNA, 21 nt, synthetic construct
  source 1..21: mol_type = other RNA
gatgatctgcccagtcacact

SEQ ID NO: 4627 - RNA, 21 nt, synthetic construct
  source 1..21: mol_type = other RNA
gatgcagagaagtccaagttc

SEQ ID NO: 4628 - RNA, 21 nt, synthetic construct
  source 1..21: mol_type = other RNA
gatgctctcccaaatcaattc

SEQ ID NO: 4629 - RNA, 21 nt, synthetic construct
  source 1..21: mol_type = other RNA
gatgctgaaaccccattcaaa

SEQ ID NO: 4630 - RNA, 21 nt, synthetic construct
  source 1..21: mol_type = other RNA
gatgtaactacaaggagctcc

SEQ ID NO: 4631 - RNA, 21 nt, synthetic construct
  source 1..21: mol_type = other RNA
gatgtccaatgtggaaatggc

SEQ ID NO: 4632 - RNA, 21 nt, synthetic construct
  source 1..21: mol_type = other RNA
gatgtctgcagagctgtataa

SEQ ID NO: 4633 - RNA, 21 nt, synthetic construct
  source 1..21: mol_type = other RNA
gattcttctttccctgctaaa

SEQ ID NO: 4634 - RNA, 21 nt, synthetic construct
  source 1..21: mol_type = other RNA
gatttgaatggggtttcagca

SEQ ID NO: 4635 - RNA, 21 nt, synthetic construct
  source 1..21: mol_type = other RNA
gatttgggagagcatcaggaa

SEQ ID NO: 4636 - RNA, 21 nt, synthetic construct
  source 1..21: mol_type = other RNA
gcaaacacagtccccatacag

SEQ ID NO: 4637 - RNA, 21 nt, synthetic construct
  source 1..21: mol_type = other RNA
gcaaaggaactgccagtatgg

SEQ ID NO: 4638 - RNA, 21 nt, synthetic construct
  source 1..21: mol_type = other RNA
gcaagagagagggaggaactt

SEQ ID NO: 4639 - RNA, 21 nt, synthetic construct
  source 1..21: mol_type = other RNA
gcaaggctttgatctttcttc

SEQ ID NO: 4640 - RNA, 21 nt, synthetic construct
  source 1..21: mol_type = other RNA
gcaataccatactggcagttc

SEQ ID NO: 4641 - RNA, 21 nt, synthetic construct
  source 1..21: mol_type = other RNA
gcaataggctataccatgtag

SEQ ID NO: 4642 - RNA, 21 nt, synthetic construct
  source 1..21: mol_type = other RNA
gcagaagaaagatcaaagcct

SEQ ID NO: 4643 - RNA, 21 nt, synthetic construct
  source 1..21: mol_type = other RNA
gcagacatcccattcctgtat

SEQ ID NO: 4644 - RNA, 21 nt, synthetic construct
  source 1..21: mol_type = other RNA
gcagagaagtccaagttcctc

SEQ ID NO: 4645 - RNA, 21 nt, synthetic construct
  source 1..21: mol_type = other RNA
gcagagatgtccaatgtggaa

SEQ ID NO: 4646 - RNA, 21 nt, synthetic construct
  source 1..21: mol_type = other RNA
gcagagctgtataactcctct

SEQ ID NO: 4647 - RNA, 21 nt, synthetic construct
  source 1..21: mol_type = other RNA
gcagatcatccaccttcctga

SEQ ID NO: 4648 - RNA, 21 nt, synthetic construct
  source 1..21: mol_type = other RNA
gcaggataaaggcaggtggtt

SEQ ID NO: 4649 - RNA, 21 nt, synthetic construct
  source 1..21: mol_type = other RNA
gcagggaaagaagaatcctac

SEQ ID NO: 4650 - RNA, 21 nt, synthetic construct
  source 1..21: mol_type = other RNA
gcaggtaatgtgggtaaccac

SEQ ID NO: 4651 - RNA, 21 nt, synthetic construct
  source 1..21: mol_type = other RNA
gcaggtggttacccacattac

SEQ ID NO: 4652 - RNA, 21 nt, synthetic construct
  source 1..21: mol_type = other RNA
gcagtagaatttcattgaaaa

SEQ ID NO: 4653 - RNA, 21 nt, synthetic construct
  source 1..21: mol_type = other RNA
gcagttcctttgccctctctg

SEQ ID NO: 4654 - RNA, 21 nt, synthetic construct
  source 1..21: mol_type = other RNA
gcataggctacatggtatagc

SEQ ID NO: 4655 - RNA, 21 nt, synthetic construct
  source 1..21: mol_type = other RNA
gcatcaatgtaccctgggcag

SEQ ID NO: 4656 - RNA, 21 nt, synthetic construct
  source 1..21: mol_type = other RNA
gcatcaggaaggtggatgatc

SEQ ID NO: 4657 - RNA, 21 nt, synthetic construct
  source 1..21: mol_type = other RNA
gcatctttagttggagtccaa

SEQ ID NO: 4658 - RNA, 21 nt, synthetic construct
  source 1..21: mol_type = other RNA
gcatgaagaaggtgtatggcc

SEQ ID NO: 4659 - RNA, 21 nt, synthetic construct
  source 1..21: mol_type = other RNA
gcatttctcagaacatgtccc

SEQ ID NO: 4660 - RNA, 21 nt, synthetic construct
  source 1..21: mol_type = other RNA
gccactagaggagataaaggg

SEQ ID NO: 4661 - RNA, 21 nt, synthetic construct
  source 1..21: mol_type = other RNA
gccactccacaggagaaggga

SEQ ID NO: 4662 - RNA, 21 nt, synthetic construct
  source 1..21: mol_type = other RNA
gccaggacctgaactctaata

SEQ ID NO: 4663 - RNA, 21 nt, synthetic construct
  source 1..21: mol_type = other RNA
gccagtatggtattgcaggat

SEQ ID NO: 4664 - RNA, 21 nt, synthetic construct
  source 1..21: mol_type = other RNA
gccatacaccttcttcatgcc

SEQ ID NO: 4665 - RNA, 21 nt, synthetic construct
  source 1..21: mol_type = other RNA
gccatacctggggccatacac

SEQ ID NO: 4666 - RNA, 21 nt, synthetic construct
  source 1..21: mol_type = other RNA
gccatattactgaccctctac

SEQ ID NO: 4667 - RNA, 21 nt, synthetic construct
  source 1..21: mol_type = other RNA
gccatttccacattggacatc

SEQ ID NO: 4668 - RNA, 21 nt, synthetic construct
  source 1..21: mol_type = other RNA
gcccacagtattcagtacagt

SEQ ID NO: 4669 - RNA, 21 nt, synthetic construct
  source 1..21: mol_type = other RNA
gcccagggtacattgatgctg

SEQ ID NO: 4670 - RNA, 21 nt, synthetic construct
  source 1..21: mol_type = other RNA
gcccagtcacactgttagtaa

SEQ ID NO: 4671 - RNA, 21 nt, synthetic construct
  source 1..21: mol_type = other RNA
gccccaggtatggccatatta

SEQ ID NO: 4672 - RNA, 21 nt, synthetic construct
  source 1..21: mol_type = other RNA
gccctctctgtagagggtcag

SEQ ID NO: 4673 - RNA, 21 nt, synthetic construct
  source 1..21: mol_type = other RNA
gcctactacacgcataggcta

SEQ ID NO: 4674 - RNA, 21 nt, synthetic construct
  source 1..21: mol_type = other RNA
gcctatgcgtgtagtaggcta

SEQ ID NO: 4675 - RNA, 21 nt, synthetic construct
  source 1..21: mol_type = other RNA
gcctcttagaggttcccaggc

SEQ ID NO: 4676 - RNA, 21 nt, synthetic construct
  source 1..21: mol_type = other RNA
gcctgggaacctctaagaggc

SEQ ID NO: 4677 - RNA, 21 nt, synthetic construct
  source 1..21: mol_type = other RNA
gcctgttactgtactgaatac

SEQ ID NO: 4678 - RNA, 21 nt, synthetic construct
  source 1..21: mol_type = other RNA
gccttgcaggtaatgtgggta

SEQ ID NO: 4679 - RNA, 21 nt, synthetic construct
  source 1..21: mol_type = other RNA
gcctttatcctgcaataccat

SEQ ID NO: 4680 - RNA, 21 nt, synthetic construct
  source 1..21: mol_type = other RNA
gcctttggactccaactaaag

SEQ ID NO: 4681 - RNA, 21 nt, synthetic construct
  source 1..21: mol_type = other RNA
gcgtgtagtaggctacaacac

SEQ ID NO: 4682 - RNA, 21 nt, synthetic construct
  source 1..21: mol_type = other RNA
gctaaaatgttactctgtcaa

SEQ ID NO: 4683 - RNA, 21 nt, synthetic construct
  source 1..21: mol_type = other RNA
gctacaacacctaggtttgtg

SEQ ID NO: 4684 - RNA, 21 nt, synthetic construct
  source 1..21: mol_type = other RNA
gctacatggtatagcctattg

SEQ ID NO: 4685 - RNA, 21 nt, synthetic construct
  source 1..21: mol_type = other RNA
gctataccatgtagcctatgc

SEQ ID NO: 4686 - RNA, 21 nt, synthetic construct
  source 1..21: mol_type = other RNA
gctccagaagcaagagagagg

SEQ ID NO: 4687 - RNA, 21 nt, synthetic construct
  source 1..21: mol_type = other RNA
gctcctagactacaaacctgt

SEQ ID NO: 4688 - RNA, 21 nt, synthetic construct
  source 1..21: mol_type = other RNA
gctccttgtagttacatctat

SEQ ID NO: 4689 - RNA, 21 nt, synthetic construct
  source 1..21: mol_type = other RNA
gctctaacatgataaccctca

SEQ ID NO: 4690 - RNA, 21 nt, synthetic construct
  source 1..21: mol_type = other RNA
gctctacaatttactaacagt

SEQ ID NO: 4691 - RNA, 21 nt, synthetic construct
  source 1..21: mol_type = other RNA
gctctcccaaatcaattccct

SEQ ID NO: 4692 - RNA, 21 nt, synthetic construct
  source 1..21: mol_type = other RNA
gctctgcagacatcccattcc

SEQ ID NO: 4693 - RNA, 21 nt, synthetic construct
  source 1..21: mol_type = other RNA
gctgaaaccccattcaaatct

SEQ ID NO: 4694 - RNA, 21 nt, synthetic construct
  source 1..21: mol_type = other RNA
gctgaggagagaaaatgaacc

SEQ ID NO: 4695 - RNA, 21 nt, synthetic construct
  source 1..21: mol_type = other RNA
gctgtataactcctctcttct

SEQ ID NO: 4696 - RNA, 21 nt, synthetic construct
  source 1..21: mol_type = other RNA
gctgtctataaatagtcctca

SEQ ID NO: 4697 - RNA, 21 nt, synthetic construct
  source 1..21: mol_type = other RNA
gcttacacaaacctaggtgtt

SEQ ID NO: 4698 - RNA, 21 nt, synthetic construct
  source 1..21: mol_type = other RNA
gcttctggagctccttgtagt

SEQ ID NO: 4699 - RNA, 21 nt, synthetic construct
  source 1..21: mol_type = other RNA
gctttgatctttcttctgcca

SEQ ID NO: 4700 - RNA, 21 nt, synthetic construct
  source 1..21: mol_type = other RNA
gcttttcaatgaaattctact

SEQ ID NO: 4701 - RNA, 21 nt, synthetic construct
  source 1..21: mol_type = other RNA
ggaaaagagtggttcattttc

SEQ ID NO: 4702 - RNA, 21 nt, synthetic construct
  source 1..21: mol_type = other RNA
ggaaacagattgttataactt

SEQ ID NO: 4703 - RNA, 21 nt, synthetic construct
  source 1..21: mol_type = other RNA
ggaaagaagaatcctacaggg

SEQ ID NO: 4704 - RNA, 21 nt, synthetic construct
  source 1..21: mol_type = other RNA
ggaaatggcagaagaaagatc

SEQ ID NO: 4705 - RNA, 21 nt, synthetic construct
  source 1..21: mol_type = other RNA
ggaacatgaccctgtaggatt

SEQ ID NO: 4706 - RNA, 21 nt, synthetic construct
  source 1..21: mol_type = other RNA
ggaacctctaagaggcaaaca

SEQ ID NO: 4707 - RNA, 21 nt, synthetic construct
  source 1..21: mol_type = other RNA
ggaactgccagtatggtattg

SEQ ID NO: 4708 - RNA, 21 nt, synthetic construct
  source 1..21: mol_type = other RNA
ggaacttggacttctctgcat

SEQ ID NO: 4709 - RNA, 21 nt, synthetic construct
  source 1..21: mol_type = other RNA
ggaaggtggatgatctgccca

SEQ ID NO: 4710 - RNA, 21 nt, synthetic construct
  source 1..21: mol_type = other RNA
ggaatgggatgtctgcagagc

SEQ ID NO: 4711 - RNA, 21 nt, synthetic construct
  source 1..21: mol_type = other RNA
ggaattgatttgggagagcat

SEQ ID NO: 4712 - RNA, 21 nt, synthetic construct
  source 1..21: mol_type = other RNA
ggacagtgaaacaaaaacatt

SEQ ID NO: 4713 - RNA, 21 nt, synthetic construct
  source 1..21: mol_type = other RNA
ggacatctctgctgaggagag

SEQ ID NO: 4714 - RNA, 21 nt, synthetic construct
  source 1..21: mol_type = other RNA
ggacatgttctgagaaatgct

SEQ ID NO: 4715 - RNA, 21 nt, synthetic construct
  source 1..21: mol_type = other RNA
ggacctgaactctaatatagt

SEQ ID NO: 4716 - RNA, 21 nt, synthetic construct
  source 1..21: mol_type = other RNA
ggactatttatagacagctct

SEQ ID NO: 4717 - RNA, 21 nt, synthetic construct
  source 1..21: mol_type = other RNA
ggactccaactaaagatgcag

SEQ ID NO: 4718 - RNA, 21 nt, synthetic construct
  source 1..21: mol_type = other RNA
ggactgtgtttgcctcttaga

SEQ ID NO: 4719 - RNA, 21 nt, synthetic construct
  source 1..21: mol_type = other RNA
ggacttctctgcatctttagt

SEQ ID NO: 4720 - RNA, 21 nt, synthetic construct
  source 1..21: mol_type = other RNA
ggagaacattgacagagtaac

SEQ ID NO: 4721 - RNA, 21 nt, synthetic construct
  source 1..21: mol_type = other RNA
ggagaagggaacatgaccctg

SEQ ID NO: 4722 - RNA, 21 nt, synthetic construct
  source 1..21: mol_type = other RNA
ggagagaaaatgaaccactct

SEQ ID NO: 4723 - RNA, 21 nt, synthetic construct
  source 1..21: mol_type = other RNA
ggagagcatcaggaaggtgga

SEQ ID NO: 4724 - RNA, 21 nt, synthetic construct
  source 1..21: mol_type = other RNA
ggagataaagggaaacagatt

SEQ ID NO: 4725 - RNA, 21 nt, synthetic construct
  source 1..21: mol_type = other RNA
ggagatttgaatggggtttca

SEQ ID NO: 4726 - RNA, 21 nt, synthetic construct
  source 1..21: mol_type = other RNA
ggagctccagaagcaagagag

SEQ ID NO: 4727 - RNA, 21 nt, synthetic construct
  source 1..21: mol_type = other RNA
ggagctccttgtagttacatc

SEQ ID NO: 4728 - RNA, 21 nt, synthetic construct
  source 1..21: mol_type = other RNA
ggaggaacttggacttctctg

SEQ ID NO: 4729 - RNA, 21 nt, synthetic construct
  source 1..21: mol_type = other RNA
ggagtccaaaggcttttcaat

SEQ ID NO: 4730 - RNA, 21 nt, synthetic construct
  source 1..21: mol_type = other RNA
ggagtggcatgaagaaggtgt

SEQ ID NO: 4731 - RNA, 21 nt, synthetic construct
  source 1..21: mol_type = other RNA
ggagttatacagctctgcaga

SEQ ID NO: 4732 - RNA, 21 nt, synthetic construct
  source 1..21: mol_type = other RNA
ggataaaggcaggtggttacc

SEQ ID NO: 4733 - RNA, 21 nt, synthetic construct
  source 1..21: mol_type = other RNA
ggatgatctgcccagtcacac

SEQ ID NO: 4734 - RNA, 21 nt, synthetic construct
  source 1..21: mol_type = other RNA
ggatgtctgcagagctgtata

SEQ ID NO: 4735 - RNA, 21 nt, synthetic construct
  source 1..21: mol_type = other RNA
ggattcttctttccctgctaa

SEQ ID NO: 4736 - RNA, 21 nt, synthetic construct
  source 1..21: mol_type = other RNA
ggcaaacacagtccccataca

SEQ ID NO: 4737 - RNA, 21 nt, synthetic construct
  source 1..21: mol_type = other RNA
ggcaaaggaactgccagtatg

SEQ ID NO: 4738 - RNA, 21 nt, synthetic construct
  source 1..21: mol_type = other RNA
ggcagaagaaagatcaaagcc

SEQ ID NO: 4739 - RNA, 21 nt, synthetic construct
  source 1..21: mol_type = other RNA
ggcagatcatccaccttcctg

SEQ ID NO: 4740 - RNA, 21 nt, synthetic construct
  source 1..21: mol_type = other RNA
ggcaggtggttacccacatta

SEQ ID NO: 4741 - RNA, 21 nt, synthetic construct
  source 1..21: mol_type = other RNA
ggcagtagaatttcattgaaa

SEQ ID NO: 4742 - RNA, 21 nt, synthetic construct
  source 1..21: mol_type = other RNA
ggcagttcctttgccctctct

SEQ ID NO: 4743 - RNA, 21 nt, synthetic construct
  source 1..21: mol_type = other RNA
ggcatgaagaaggtgtatggc

SEQ ID NO: 4744 - RNA, 21 nt, synthetic construct
  source 1..21: mol_type = other RNA
ggccactagaggagataaagg

SEQ ID NO: 4745 - RNA, 21 nt, synthetic construct
  source 1..21: mol_type = other RNA
ggccatacaccttcttcatgc

SEQ ID NO: 4746 - RNA, 21 nt, synthetic construct
  source 1..21: mol_type = other RNA
ggccatacctggggccataca

SEQ ID NO: 4747 - RNA, 21 nt, synthetic construct
  source 1..21: mol_type = other RNA
ggccatattactgaccctcta

SEQ ID NO: 4748 - RNA, 21 nt, synthetic construct
  source 1..21: mol_type = other RNA
ggccccaggtatggccatatt

SEQ ID NO: 4749 - RNA, 21 nt, synthetic construct
  source 1..21: mol_type = other RNA
ggcctgggaacctctaagagg

SEQ ID NO: 4750 - RNA, 21 nt, synthetic construct
  source 1..21: mol_type = other RNA
ggctacaacacctaggtttgt

SEQ ID NO: 4751 - RNA, 21 nt, synthetic construct
  source 1..21: mol_type = other RNA
ggctataccatgtagcctatg

SEQ ID NO: 4752 - RNA, 21 nt, synthetic construct
  source 1..21: mol_type = other RNA
ggctctacaatttactaacag

SEQ ID NO: 4753 - RNA, 21 nt, synthetic construct
  source 1..21: mol_type = other RNA
ggctgtacaggtttgtagtct

SEQ ID NO: 4754 - RNA, 21 nt, synthetic construct
  source 1..21: mol_type = other RNA
ggctttgatctttcttctgcc

SEQ ID NO: 4755 - RNA, 21 nt, synthetic construct
  source 1..21: mol_type = other RNA
ggcttttcaatgaaattctac

SEQ ID NO: 4756 - RNA, 21 nt, synthetic construct
  source 1..21: mol_type = other RNA
gggaaacagattgttataact

SEQ ID NO: 4757 - RNA, 21 nt, synthetic construct
  source 1..21: mol_type = other RNA
gggaaagaagaatcctacagg

SEQ ID NO: 4758 - RNA, 21 nt, synthetic construct
  source 1..21: mol_type = other RNA
gggaacatgaccctgtaggat

SEQ ID NO: 4759 - RNA, 21 nt, synthetic construct
  source 1..21: mol_type = other RNA
gggaacctctaagaggcaaac

SEQ ID NO: 4760 - RNA, 21 nt, synthetic construct
  source 1..21: mol_type = other RNA
gggaattgatttgggagagca

SEQ ID NO: 4761 - RNA, 21 nt, synthetic construct
  source 1..21: mol_type = other RNA
gggacatgttctgagaaatgc

SEQ ID NO: 4762 - RNA, 21 nt, synthetic construct
  source 1..21: mol_type = other RNA
gggactgtgtttgcctcttag

SEQ ID NO: 4763 - RNA, 21 nt, synthetic construct
  source 1..21: mol_type = other RNA
gggagagcatcaggaaggtgg

SEQ ID NO: 4764 - RNA, 21 nt, synthetic construct
  source 1..21: mol_type = other RNA
gggaggaacttggacttctct

SEQ ID NO: 4765 - RNA, 21 nt, synthetic construct
  source 1..21: mol_type = other RNA
gggatgtctgcagagctgtat

SEQ ID NO: 4766 - RNA, 21 nt, synthetic construct
  source 1..21: mol_type = other RNA
gggcaaaggaactgccagtat

SEQ ID NO: 4767 - RNA, 21 nt, synthetic construct
  source 1..21: mol_type = other RNA
gggcagatcatccaccttcct

SEQ ID NO: 4768 - RNA, 21 nt, synthetic construct
  source 1..21: mol_type = other RNA
gggcagtagaatttcattgaa

SEQ ID NO: 4769 - RNA, 21 nt, synthetic construct
  source 1..21: mol_type = other RNA
gggccatacaccttcttcatg

SEQ ID NO: 4770 - RNA, 21 nt, synthetic construct
  source 1..21: mol_type = other RNA
ggggacatgttctgagaaatg

SEQ ID NO: 4771 - RNA, 21 nt, synthetic construct
  source 1..21: mol_type = other RNA
ggggactgtgtttgcctctta

SEQ ID NO: 4772 - RNA, 21 nt, synthetic construct
  source 1..21: mol_type = other RNA
ggggccatacaccttcttcat

SEQ ID NO: 4773 - RNA, 21 nt, synthetic construct
  source 1..21: mol_type = other RNA
ggggtttcagcatcaatgtac

SEQ ID NO: 4774 - RNA, 21 nt, synthetic construct
  source 1..21: mol_type = other RNA
gggtaaccacctgcctttatc

SEQ ID NO: 4775 - RNA, 21 nt, synthetic construct
  source 1..21: mol_type = other RNA
gggtacattgatgctgaaacc

SEQ ID NO: 4776 - RNA, 21 nt, synthetic construct
  source 1..21: mol_type = other RNA
gggtcagtaatatggccatac

SEQ ID NO: 4777 - RNA, 21 nt, synthetic construct
  source 1..21: mol_type = other RNA
gggtcatgttcccttctcctg

SEQ ID NO: 4778 - RNA, 21 nt, synthetic construct
  source 1..21: mol_type = other RNA
gggttatcatgttagagctgt

SEQ ID NO: 4779 - RNA, 21 nt, synthetic construct
  source 1..21: mol_type = other RNA
gggtttcagcatcaatgtacc

SEQ ID NO: 4780 - RNA, 21 nt, synthetic construct
  source 1..21: mol_type = other RNA
ggtaaccacctgcctttatcc

SEQ ID NO: 4781 - RNA, 21 nt, synthetic construct
  source 1..21: mol_type = other RNA
ggtaatgtgggtaaccacctg

SEQ ID NO: 4782 - RNA, 21 nt, synthetic construct
  source 1..21: mol_type = other RNA
ggtacattgatgctgaaaccc

SEQ ID NO: 4783 - RNA, 21 nt, synthetic construct
  source 1..21: mol_type = other RNA
ggtatggccatattactgacc

SEQ ID NO: 4784 - RNA, 21 nt, synthetic construct
  source 1..21: mol_type = other RNA
ggtattgcaggataaaggcag

SEQ ID NO: 4785 - RNA, 21 nt, synthetic construct
  source 1..21: mol_type = other RNA
ggtcagtaatatggccatacc

SEQ ID NO: 4786 - RNA, 21 nt, synthetic construct
  source 1..21: mol_type = other RNA
ggtcatgttcccttctcctgt

SEQ ID NO: 4787 - RNA, 21 nt, synthetic construct
  source 1..21: mol_type = other RNA
ggtcctggctctacaatttac

SEQ ID NO: 4788 - RNA, 21 nt, synthetic construct
  source 1..21: mol_type = other RNA
ggtggatgatctgcccagtca

SEQ ID NO: 4789 - RNA, 21 nt, synthetic construct
  source 1..21: mol_type = other RNA
ggtggttacccacattacctg

SEQ ID NO: 4790 - RNA, 21 nt, synthetic construct
  source 1..21: mol_type = other RNA
ggtgtatggccccaggtatgg

SEQ ID NO: 4791 - RNA, 21 nt, synthetic construct
  source 1..21: mol_type = other RNA
ggtgttgtagcctactacacg

SEQ ID NO: 4792 - RNA, 21 nt, synthetic construct
  source 1..21: mol_type = other RNA
ggttacccacattacctgcaa

SEQ ID NO: 4793 - RNA, 21 nt, synthetic construct
  source 1..21: mol_type = other RNA
ggttatcatgttagagctgtc

SEQ ID NO: 4794 - RNA, 21 nt, synthetic construct
  source 1..21: mol_type = other RNA
ggttcattttctctcctcagc

SEQ ID NO: 4795 - RNA, 21 nt, synthetic construct
  source 1..21: mol_type = other RNA
ggttcccaggccactagagga

SEQ ID NO: 4796 - RNA, 21 nt, synthetic construct
  source 1..21: mol_type = other RNA
ggtttcagcatcaatgtaccc

SEQ ID NO: 4797 - RNA, 21 nt, synthetic construct
  source 1..21: mol_type = other RNA
ggtttgtgtaagcatttctca

SEQ ID NO: 4798 - RNA, 21 nt, synthetic construct
  source 1..21: mol_type = other RNA
gtaaattgtagagccaggacc

SEQ ID NO: 4799 - RNA, 21 nt, synthetic construct
  source 1..21: mol_type = other RNA
gtaacacatgactatattaga

SEQ ID NO: 4800 - RNA, 21 nt, synthetic construct
  source 1..21: mol_type = other RNA
gtaacaggctgtacaggtttg

SEQ ID NO: 4801 - RNA, 21 nt, synthetic construct
  source 1..21: mol_type = other RNA
gtaacattttagcagggaaag

SEQ ID NO: 4802 - RNA, 21 nt, synthetic construct
  source 1..21: mol_type = other RNA
gtaaccacctgcctttatcct

SEQ ID NO: 4803 - RNA, 21 nt, synthetic construct
  source 1..21: mol_type = other RNA
gtaactacaaggagctccaga

SEQ ID NO: 4804 - RNA, 21 nt, synthetic construct
  source 1..21: mol_type = other RNA
gtaagcatttctcagaacatg

SEQ ID NO: 4805 - RNA, 21 nt, synthetic construct
  source 1..21: mol_type = other RNA
gtaagtttttgaccttgagaa

SEQ ID NO: 4806 - RNA, 21 nt, synthetic construct
  source 1..21: mol_type = other RNA
gtaatatggccatacctgggg

SEQ ID NO: 4807 - RNA, 21 nt, synthetic construct
  source 1..21: mol_type = other RNA
gtaatgtgggtaaccacctgc

SEQ ID NO: 4808 - RNA, 21 nt, synthetic construct
  source 1..21: mol_type = other RNA
gtacattgatgctgaaacccc

SEQ ID NO: 4809 - RNA, 21 nt, synthetic construct
  source 1..21: mol_type = other RNA
gtaccctgggcagtagaattt

SEQ ID NO: 4810 - RNA, 21 nt, synthetic construct
  source 1..21: mol_type = other RNA
gtagaatttcattgaaaagcc

SEQ ID NO: 4811 - RNA, 21 nt, synthetic construct
  source 1..21: mol_type = other RNA
gtagagccaggacctgaactc

SEQ ID NO: 4812 - RNA, 21 nt, synthetic construct
  source 1..21: mol_type = other RNA
gtagagggtcagtaatatggc

SEQ ID NO: 4813 - RNA, 21 nt, synthetic construct
  source 1..21: mol_type = other RNA
gtagcctactacacgcatagg

SEQ ID NO: 4814 - RNA, 21 nt, synthetic construct
  source 1..21: mol_type = other RNA
gtagcctatgcgtgtagtagg

SEQ ID NO: 4815 - RNA, 21 nt, synthetic construct
  source 1..21: mol_type = other RNA
gtaggattcttctttccctgc

SEQ ID NO: 4816 - RNA, 21 nt, synthetic construct
  source 1..21: mol_type = other RNA
gtaggctacaacacctaggtt

SEQ ID NO: 4817 - RNA, 21 nt, synthetic construct
  source 1..21: mol_type = other RNA
gtagtaggctacaacacctag

SEQ ID NO: 4818 - RNA, 21 nt, synthetic construct
  source 1..21: mol_type = other RNA
gtagtctaggagcaataggct

SEQ ID NO: 4819 - RNA, 21 nt, synthetic construct
  source 1..21: mol_type = other RNA
gtataactcctctcttctgtc

SEQ ID NO: 4820 - RNA, 21 nt, synthetic construct
  source 1..21: mol_type = other RNA
gtatggccatattactgaccc

SEQ ID NO: 4821 - RNA, 21 nt, synthetic construct
  source 1..21: mol_type = other RNA
gtatggccccaggtatggcca

SEQ ID NO: 4822 - RNA, 21 nt, synthetic construct
  source 1..21: mol_type = other RNA
gtatggggactgtgtttgcct

SEQ ID NO: 4823 - RNA, 21 nt, synthetic construct
  source 1..21: mol_type = other RNA
gtatggtattgcaggataaag

SEQ ID NO: 4824 - RNA, 21 nt, synthetic construct
  source 1..21: mol_type = other RNA
gtattgcaggataaaggcagg

SEQ ID NO: 4825 - RNA, 21 nt, synthetic construct
  source 1..21: mol_type = other RNA
gtcaatgttctccacatagtg

SEQ ID NO: 4826 - RNA, 21 nt, synthetic construct
  source 1..21: mol_type = other RNA
gtcacactgttagtaaattgt

SEQ ID NO: 4827 - RNA, 21 nt, synthetic construct
  source 1..21: mol_type = other RNA
gtcagtaatatggccatacct

SEQ ID NO: 4828 - RNA, 21 nt, synthetic construct
  source 1..21: mol_type = other RNA
gtcatgtgttacttaatgacg

SEQ ID NO: 4829 - RNA, 21 nt, synthetic construct
  source 1..21: mol_type = other RNA
gtcatgttcccttctcctgtg

SEQ ID NO: 4830 - RNA, 21 nt, synthetic construct
  source 1..21: mol_type = other RNA
gtcattaagtaacacatgact

SEQ ID NO: 4831 - RNA, 21 nt, synthetic construct
  source 1..21: mol_type = other RNA
gtccaaaggcttttcaatgaa

SEQ ID NO: 4832 - RNA, 21 nt, synthetic construct
  source 1..21: mol_type = other RNA
gtccaagttcctccctctctc

SEQ ID NO: 4833 - RNA, 21 nt, synthetic construct
  source 1..21: mol_type = other RNA
gtccaatgtggaaatggcaga

SEQ ID NO: 4834 - RNA, 21 nt, synthetic construct
  source 1..21: mol_type = other RNA
gtccccatacaggaatgggat

SEQ ID NO: 4835 - RNA, 21 nt, synthetic construct
  source 1..21: mol_type = other RNA
gtccccgtcattaagtaacac

SEQ ID NO: 4836 - RNA, 21 nt, synthetic construct
  source 1..21: mol_type = other RNA
gtcctcaggacagtgaaacaa

SEQ ID NO: 4837 - RNA, 21 nt, synthetic construct
  source 1..21: mol_type = other RNA
gtcctgaggactatttataga

SEQ ID NO: 4838 - RNA, 21 nt, synthetic construct
  source 1..21: mol_type = other RNA
gtcctggctctacaatttact

SEQ ID NO: 4839 - RNA, 21 nt, synthetic construct
  source 1..21: mol_type = other RNA
gtctaggagcaataggctata

SEQ ID NO: 4840 - RNA, 21 nt, synthetic construct
  source 1..21: mol_type = other RNA
gtctataaatagtcctcagga

SEQ ID NO: 4841 - RNA, 21 nt, synthetic construct
  source 1..21: mol_type = other RNA
gtctgaagaataaaacaacat

SEQ ID NO: 4842 - RNA, 21 nt, synthetic construct
  source 1..21: mol_type = other RNA
gtctgcagagctgtataactc

SEQ ID NO: 4843 - RNA, 21 nt, synthetic construct
  source 1..21: mol_type = other RNA
gtgaaacaaaaacattttctc

SEQ ID NO: 4844 - RNA, 21 nt, synthetic construct
  source 1..21: mol_type = other RNA
gtgactgggcagatcatccac

SEQ ID NO: 4845 - RNA, 21 nt, synthetic construct
  source 1..21: mol_type = other RNA
gtgagggttatcatgttagag

SEQ ID NO: 4846 - RNA, 21 nt, synthetic construct
  source 1..21: mol_type = other RNA
gtggaaatggcagaagaaaga

SEQ ID NO: 4847 - RNA, 21 nt, synthetic construct
  source 1..21: mol_type = other RNA
gtggagaacattgacagagta

SEQ ID NO: 4848 - RNA, 21 nt, synthetic construct
  source 1..21: mol_type = other RNA
gtggagtggcatgaagaaggt

SEQ ID NO: 4849 - RNA, 21 nt, synthetic construct
  source 1..21: mol_type = other RNA
gtggatgatctgcccagtcac

SEQ ID NO: 4850 - RNA, 21 nt, synthetic construct
  source 1..21: mol_type = other RNA
gtggcatgaagaaggtgtatg

SEQ ID NO: 4851 - RNA, 21 nt, synthetic construct
  source 1..21: mol_type = other RNA
gtggcctgggaacctctaaga

SEQ ID NO: 4852 - RNA, 21 nt, synthetic construct
  source 1..21: mol_type = other RNA
gtgggtaaccacctgccttta

SEQ ID NO: 4853 - RNA, 21 nt, synthetic construct
  source 1..21: mol_type = other RNA
gtggttacccacattacctgc

SEQ ID NO: 4854 - RNA, 21 nt, synthetic construct
  source 1..21: mol_type = other RNA
gtggttcattttctctcctca

SEQ ID NO: 4855 - RNA, 21 nt, synthetic construct
  source 1..21: mol_type = other RNA
gtgtaagcatttctcagaaca

SEQ ID NO: 4856 - RNA, 21 nt, synthetic construct
  source 1..21: mol_type = other RNA
gtgtagtaggctacaacacct

SEQ ID NO: 4857 - RNA, 21 nt, synthetic construct
  source 1..21: mol_type = other RNA
gtgtatggccccaggtatggc

SEQ ID NO: 4858 - RNA, 21 nt, synthetic construct
  source 1..21: mol_type = other RNA
gtgtgactgggcagatcatcc

SEQ ID NO: 4859 - RNA, 21 nt, synthetic construct
  source 1..21: mol_type = other RNA
gtgttacttaatgacggggac

SEQ ID NO: 4860 - RNA, 21 nt, synthetic construct
  source 1..21: mol_type = other RNA
gtgttgtagcctactacacgc

SEQ ID NO: 4861 - RNA, 21 nt, synthetic construct
  source 1..21: mol_type = other RNA
gtgtttgcctcttagaggttc

SEQ ID NO: 4862 - RNA, 21 nt, synthetic construct
  source 1..21: mol_type = other RNA
gttacccacattacctgcaag

SEQ ID NO: 4863 - RNA, 21 nt, synthetic construct
  source 1..21: mol_type = other RNA
gttactctgtcaatgttctcc

SEQ ID NO: 4864 - RNA, 21 nt, synthetic construct
  source 1..21: mol_type = other RNA
gttacttaatgacggggacat

SEQ ID NO: 4865 - RNA, 21 nt, synthetic construct
  source 1..21: mol_type = other RNA
gttagagctgtctataaatag

SEQ ID NO: 4866 - RNA, 21 nt, synthetic construct
  source 1..21: mol_type = other RNA
gttagtaaattgtagagccag

SEQ ID NO: 4867 - RNA, 21 nt, synthetic construct
  source 1..21: mol_type = other RNA
gttataacaatctgtttccct

SEQ ID NO: 4868 - RNA, 21 nt, synthetic construct
  source 1..21: mol_type = other RNA
gttatacagctctgcagacat

SEQ ID NO: 4869 - RNA, 21 nt, synthetic construct
  source 1..21: mol_type = other RNA
gttatattctagaacagggaa

SEQ ID NO: 4870 - RNA, 21 nt, synthetic construct
  source 1..21: mol_type = other RNA
gttatcatgttagagctgtct

SEQ ID NO: 4871 - RNA, 21 nt, synthetic construct
  source 1..21: mol_type = other RNA
gttcaggtcctggctctacaa

SEQ ID NO: 4872 - RNA, 21 nt, synthetic construct
  source 1..21: mol_type = other RNA
gttcattttctctcctcagca

SEQ ID NO: 4873 - RNA, 21 nt, synthetic construct
  source 1..21: mol_type = other RNA
gttcccaggccactagaggag

SEQ ID NO: 4874 - RNA, 21 nt, synthetic construct
  source 1..21: mol_type = other RNA
gttcccttctcctgtggagtg

SEQ ID NO: 4875 - RNA, 21 nt, synthetic construct
  source 1..21: mol_type = other RNA
gttcctccctctctcttgctt

SEQ ID NO: 4876 - RNA, 21 nt, synthetic construct
  source 1..21: mol_type = other RNA
gttcctttgccctctctgtag

SEQ ID NO: 4877 - RNA, 21 nt, synthetic construct
  source 1..21: mol_type = other RNA
gttctagaatataacaggaga

SEQ ID NO: 4878 - RNA, 21 nt, synthetic construct
  source 1..21: mol_type = other RNA
gttctccacatagtgagggtt

SEQ ID NO: 4879 - RNA, 21 nt, synthetic construct
  source 1..21: mol_type = other RNA
gttctgagaaatgcttacaca

SEQ ID NO: 4880 - RNA, 21 nt, synthetic construct
  source 1..21: mol_type = other RNA
gttggagtccaaaggcttttc

SEQ ID NO: 4881 - RNA, 21 nt, synthetic construct
  source 1..21: mol_type = other RNA
gttgtagcctactacacgcat

SEQ ID NO: 4882 - RNA, 21 nt, synthetic construct
  source 1..21: mol_type = other RNA
gttgttttattcttcagacag

SEQ ID NO: 4883 - RNA, 21 nt, synthetic construct
  source 1..21: mol_type = other RNA
gtttcactgtcctgaggacta

SEQ ID NO: 4884 - RNA, 21 nt, synthetic construct
  source 1..21: mol_type = other RNA
gtttcagcatcaatgtaccct

SEQ ID NO: 4885 - RNA, 21 nt, synthetic construct
  source 1..21: mol_type = other RNA
gtttccctttatctcctctag

SEQ ID NO: 4886 - RNA, 21 nt, synthetic construct
  source 1..21: mol_type = other RNA
gtttgcctcttagaggttccc

SEQ ID NO: 4887 - RNA, 21 nt, synthetic construct
  source 1..21: mol_type = other RNA
gtttgtgtaagcatttctcag

SEQ ID NO: 4888 - RNA, 21 nt, synthetic construct
  source 1..21: mol_type = other RNA
gttttattcttcagacagaag

SEQ ID NO: 4889 - RNA, 21 nt, synthetic construct
  source 1..21: mol_type = other RNA
gtttttgaccttgagaaaatg

SEQ ID NO: 4890 - RNA, 21 nt, synthetic construct
  source 1..21: mol_type = other RNA
gtttttgtttcactgtcctga

SEQ ID NO: 4891 - RNA, 21 nt, synthetic construct
  source 1..21: mol_type = other RNA
taaaatgttactctgtcaatg

SEQ ID NO: 4892 - RNA, 21 nt, synthetic construct
  source 1..21: mol_type = other RNA
taaagatgcagagaagtccaa

SEQ ID NO: 4893 - RNA, 21 nt, synthetic construct
  source 1..21: mol_type = other RNA
taaaggcaggtggttacccac

SEQ ID NO: 4894 - RNA, 21 nt, synthetic construct
  source 1..21: mol_type = other RNA
taaagggaaacagattgttat

SEQ ID NO: 4895 - RNA, 21 nt, synthetic construct
  source 1..21: mol_type = other RNA
taaatagtcctcaggacagtg

SEQ ID NO: 4896 - RNA, 21 nt, synthetic construct
  source 1..21: mol_type = other RNA
taaattgtagagccaggacct

SEQ ID NO: 4897 - RNA, 21 nt, synthetic construct
  source 1..21: mol_type = other RNA
taacaatctgtttccctttat

SEQ ID NO: 4898 - RNA, 21 nt, synthetic construct
  source 1..21: mol_type = other RNA
taacacatgactatattagag

SEQ ID NO: 4899 - RNA, 21 nt, synthetic construct
  source 1..21: mol_type = other RNA
taacaggagatttgaatgggg

SEQ ID NO: 4900 - RNA, 21 nt, synthetic construct
  source 1..21: mol_type = other RNA
taacaggctgtacaggtttgt

SEQ ID NO: 4901 - RNA, 21 nt, synthetic construct
  source 1..21: mol_type = other RNA
taacagtgtgactgggcagat

SEQ ID NO: 4902 - RNA, 21 nt, synthetic construct
  source 1..21: mol_type = other RNA
taacatgataaccctcactat

SEQ ID NO: 4903 - RNA, 21 nt, synthetic construct
  source 1..21: mol_type = other RNA
taacattttagcagggaaaga

SEQ ID NO: 4904 - RNA, 21 nt, synthetic construct
  source 1..21: mol_type = other RNA
taaccacctgcctttatcctg

SEQ ID NO: 4905 - RNA, 21 nt, synthetic construct
  source 1..21: mol_type = other RNA
taaccctcactatgtggagaa

SEQ ID NO: 4906 - RNA, 21 nt, synthetic construct
  source 1..21: mol_type = other RNA
taactacaaggagctccagaa

SEQ ID NO: 4907 - RNA, 21 nt, synthetic construct
  source 1..21: mol_type = other RNA
taactcctctcttctgtctga

SEQ ID NO: 4908 - RNA, 21 nt, synthetic construct
  source 1..21: mol_type = other RNA
taagaggcaaacacagtcccc

SEQ ID NO: 4909 - RNA, 21 nt, synthetic construct
  source 1..21: mol_type = other RNA
taagcatttctcagaacatgt

SEQ ID NO: 4910 - RNA, 21 nt, synthetic construct
  source 1..21: mol_type = other RNA
taagtttttgaccttgagaaa

SEQ ID NO: 4911 - RNA, 21 nt, synthetic construct
  source 1..21: mol_type = other RNA
taatagatgtaactacaagga

SEQ ID NO: 4912 - RNA, 21 nt, synthetic construct
  source 1..21: mol_type = other RNA
taatatggccatacctggggc

SEQ ID NO: 4913 - RNA, 21 nt, synthetic construct
  source 1..21: mol_type = other RNA
taatgacggggacatgttctg

SEQ ID NO: 4914 - RNA, 21 nt, synthetic construct
  source 1..21: mol_type = other RNA
taatgtgggtaaccacctgcc

SEQ ID NO: 4915 - RNA, 21 nt, synthetic construct
  source 1..21: mol_type = other RNA
tacaaaggaaaagagtggttc

SEQ ID NO: 4916 - RNA, 21 nt, synthetic construct
  source 1..21: mol_type = other RNA
tacaacacctaggtttgtgta

SEQ ID NO: 4917 - RNA, 21 nt, synthetic construct
  source 1..21: mol_type = other RNA
tacaaggagctccagaagcaa

SEQ ID NO: 4918 - RNA, 21 nt, synthetic construct
  source 1..21: mol_type = other RNA
tacaatttactaacagtgtga

SEQ ID NO: 4919 - RNA, 21 nt, synthetic construct
  source 1..21: mol_type = other RNA
tacacaaacctaggtgttgta

SEQ ID NO: 4920 - RNA, 21 nt, synthetic construct
  source 1..21: mol_type = other RNA
tacaccttcttcatgccactc

SEQ ID NO: 4921 - RNA, 21 nt, synthetic construct
  source 1..21: mol_type = other RNA
tacacgcataggctacatggt

SEQ ID NO: 4922 - RNA, 21 nt, synthetic construct
  source 1..21: mol_type = other RNA
tacagagagggcaaaggaact

SEQ ID NO: 4923 - RNA, 21 nt, synthetic construct
  source 1..21: mol_type = other RNA
tacagcctgttactgtactga

SEQ ID NO: 4924 - RNA, 21 nt, synthetic construct
  source 1..21: mol_type = other RNA
tacagctctgcagacatccca

SEQ ID NO: 4925 - RNA, 21 nt, synthetic construct
  source 1..21: mol_type = other RNA
tacaggaatgggatgtctgca

SEQ ID NO: 4926 - RNA, 21 nt, synthetic construct
  source 1..21: mol_type = other RNA
tacagggtcatgttcccttct

SEQ ID NO: 4927 - RNA, 21 nt, synthetic construct
  source 1..21: mol_type = other RNA
tacagtaacaggctgtacagg

SEQ ID NO: 4928 - RNA, 21 nt, synthetic construct
  source 1..21: mol_type = other RNA
tacatggtatagcctattgct

SEQ ID NO: 4929 - RNA, 21 nt, synthetic construct
  source 1..21: mol_type = other RNA
tacattgatgctgaaacccca

SEQ ID NO: 4930 - RNA, 21 nt, synthetic construct
  source 1..21: mol_type = other RNA
taccatactggcagttccttt

SEQ ID NO: 4931 - RNA, 21 nt, synthetic construct
  source 1..21: mol_type = other RNA
taccatgtagcctatgcgtgt

SEQ ID NO: 4932 - RNA, 21 nt, synthetic construct
  source 1..21: mol_type = other RNA
tacccacattacctgcaaggc

SEQ ID NO: 4933 - RNA, 21 nt, synthetic construct
  source 1..21: mol_type = other RNA
taccctgggcagtagaatttc

SEQ ID NO: 4934 - RNA, 21 nt, synthetic construct
  source 1..21: mol_type = other RNA
tacctgcaaggctttgatctt

SEQ ID NO: 4935 - RNA, 21 nt, synthetic construct
  source 1..21: mol_type = other RNA
tacctggggccatacaccttc

SEQ ID NO: 4936 - RNA, 21 nt, synthetic construct
  source 1..21: mol_type = other RNA
tactaacagtgtgactgggca

SEQ ID NO: 4937 - RNA, 21 nt, synthetic construct
  source 1..21: mol_type = other RNA
tactacacgcataggctacat

SEQ ID NO: 4938 - RNA, 21 nt, synthetic construct
  source 1..21: mol_type = other RNA
tactctgtcaatgttctccac

SEQ ID NO: 4939 - RNA, 21 nt, synthetic construct
  source 1..21: mol_type = other RNA
tactgaccctctacagagagg

SEQ ID NO: 4940 - RNA, 21 nt, synthetic construct
  source 1..21: mol_type = other RNA
tactgcccagggtacattgat

SEQ ID NO: 4941 - RNA, 21 nt, synthetic construct
  source 1..21: mol_type = other RNA
tactggcagttcctttgccct

SEQ ID NO: 4942 - RNA, 21 nt, synthetic construct
  source 1..21: mol_type = other RNA
tacttaatgacggggacatgt

SEQ ID NO: 4943 - RNA, 21 nt, synthetic construct
  source 1..21: mol_type = other RNA
tagaacagggaattgatttgg

SEQ ID NO: 4944 - RNA, 21 nt, synthetic construct
  source 1..21: mol_type = other RNA
tagaatataacaggagatttg

SEQ ID NO: 4945 - RNA, 21 nt, synthetic construct
  source 1..21: mol_type = other RNA
tagaatttcattgaaaagcct

SEQ ID NO: 4946 - RNA, 21 nt, synthetic construct
  source 1..21: mol_type = other RNA
tagacagctctaacatgataa

SEQ ID NO: 4947 - RNA, 21 nt, synthetic construct
  source 1..21: mol_type = other RNA
tagactacaaacctgtacagc

SEQ ID NO: 4948 - RNA, 21 nt, synthetic construct
  source 1..21: mol_type = other RNA
tagagccaggacctgaactct

SEQ ID NO: 4949 - RNA, 21 nt, synthetic construct
  source 1..21: mol_type = other RNA
tagagctgtctataaatagtc

SEQ ID NO: 4950 - RNA, 21 nt, synthetic construct
  source 1..21: mol_type = other RNA
tagaggagataaagggaaaca

SEQ ID NO: 4951 - RNA, 21 nt, synthetic construct
  source 1..21: mol_type = other RNA
tagagggtcagtaatatggcc

SEQ ID NO: 4952 - RNA, 21 nt, synthetic construct
  source 1..21: mol_type = other RNA
tagaggttcccaggccactag

SEQ ID NO: 4953 - RNA, 21 nt, synthetic construct
  source 1..21: mol_type = other RNA
tagagttcaggtcctggctct

SEQ ID NO: 4954 - RNA, 21 nt, synthetic construct
  source 1..21: mol_type = other RNA
tagatgtaactacaaggagct

SEQ ID NO: 4955 - RNA, 21 nt, synthetic construct
  source 1..21: mol_type = other RNA
tagcagggaaagaagaatcct

SEQ ID NO: 4956 - RNA, 21 nt, synthetic construct
  source 1..21: mol_type = other RNA
tagcctactacacgcataggc

SEQ ID NO: 4957 - RNA, 21 nt, synthetic construct
  source 1..21: mol_type = other RNA
tagcctatgcgtgtagtaggc

SEQ ID NO: 4958 - RNA, 21 nt, synthetic construct
  source 1..21: mol_type = other RNA
taggattcttctttccctgct

SEQ ID NO: 4959 - RNA, 21 nt, synthetic construct
  source 1..21: mol_type = other RNA
taggctacaacacctaggttt

SEQ ID NO: 4960 - RNA, 21 nt, synthetic construct
  source 1..21: mol_type = other RNA
taggctataccatgtagccta

SEQ ID NO: 4961 - RNA, 21 nt, synthetic construct
  source 1..21: mol_type = other RNA
taggtgttgtagcctactaca

SEQ ID NO: 4962 - RNA, 21 nt, synthetic construct
  source 1..21: mol_type = other RNA
taggtttgtgtaagcatttct

SEQ ID NO: 4963 - RNA, 21 nt, synthetic construct
  source 1..21: mol_type = other RNA
tagtaaattgtagagccagga

SEQ ID NO: 4964 - RNA, 21 nt, synthetic construct
  source 1..21: mol_type = other RNA
tagtaggctacaacacctagg

SEQ ID NO: 4965 - RNA, 21 nt, synthetic construct
  source 1..21: mol_type = other RNA
tagtcatgtgttacttaatga

SEQ ID NO: 4966 - RNA, 21 nt, synthetic construct
  source 1..21: mol_type = other RNA
tagtcctcaggacagtgaaac

SEQ ID NO: 4967 - RNA, 21 nt, synthetic construct
  source 1..21: mol_type = other RNA
tagtctaggagcaataggcta

SEQ ID NO: 4968 - RNA, 21 nt, synthetic construct
  source 1..21: mol_type = other RNA
tagtgagggttatcatgttag

SEQ ID NO: 4969 - RNA, 21 nt, synthetic construct
  source 1..21: mol_type = other RNA
tagtggcctgggaacctctaa

SEQ ID NO: 4970 - RNA, 21 nt, synthetic construct
  source 1..21: mol_type = other RNA
tagttggagtccaaaggcttt

SEQ ID NO: 4971 - RNA, 21 nt, synthetic construct
  source 1..21: mol_type = other RNA
tataaatagtcctcaggacag

SEQ ID NO: 4972 - RNA, 21 nt, synthetic construct
  source 1..21: mol_type = other RNA
tataacaatctgtttcccttt

SEQ ID NO: 4973 - RNA, 21 nt, synthetic construct
  source 1..21: mol_type = other RNA
tataacaggagatttgaatgg

SEQ ID NO: 4974 - RNA, 21 nt, synthetic construct
  source 1..21: mol_type = other RNA
tataactcctctcttctgtct

SEQ ID NO: 4975 - RNA, 21 nt, synthetic construct
  source 1..21: mol_type = other RNA
tatacaaaggaaaagagtggt

SEQ ID NO: 4976 - RNA, 21 nt, synthetic construct
  source 1..21: mol_type = other RNA
tatacagctctgcagacatcc

SEQ ID NO: 4977 - RNA, 21 nt, synthetic construct
  source 1..21: mol_type = other RNA
tataccatgtagcctatgcgt

SEQ ID NO: 4978 - RNA, 21 nt, synthetic construct
  source 1..21: mol_type = other RNA
tatagacagctctaacatgat

SEQ ID NO: 4979 - RNA, 21 nt, synthetic construct
  source 1..21: mol_type = other RNA
tatattagagttcaggtcctg

SEQ ID NO: 4980 - RNA, 21 nt, synthetic construct
  source 1..21: mol_type = other RNA
tatattctagaacagggaatt

SEQ ID NO: 4981 - RNA, 21 nt, synthetic construct
  source 1..21: mol_type = other RNA
tatcatgttagagctgtctat

SEQ ID NO: 4982 - RNA, 21 nt, synthetic construct
  source 1..21: mol_type = other RNA
tatcctgcaataccatactgg

SEQ ID NO: 4983 - RNA, 21 nt, synthetic construct
  source 1..21: mol_type = other RNA
tatctcctctagtggcctggg

SEQ ID NO: 4984 - RNA, 21 nt, synthetic construct
  source 1..21: mol_type = other RNA
tatgcgtgtagtaggctacaa

SEQ ID NO: 4985 - RNA, 21 nt, synthetic construct
  source 1..21: mol_type = other RNA
tatggccatacctggggccat

SEQ ID NO: 4986 - RNA, 21 nt, synthetic construct
  source 1..21: mol_type = other RNA
tatggccatattactgaccct

SEQ ID NO: 4987 - RNA, 21 nt, synthetic construct
  source 1..21: mol_type = other RNA
tatggccccaggtatggccat

SEQ ID NO: 4988 - RNA, 21 nt, synthetic construct
  source 1..21: mol_type = other RNA
tatggggactgtgtttgcctc

SEQ ID NO: 4989 - RNA, 21 nt, synthetic construct
  source 1..21: mol_type = other RNA
tatggtattgcaggataaagg

SEQ ID NO: 4990 - RNA, 21 nt, synthetic construct
  source 1..21: mol_type = other RNA
tatgtggagaacattgacaga

SEQ ID NO: 4991 - RNA, 21 nt, synthetic construct
  source 1..21: mol_type = other RNA
tattactgaccctctacagag

SEQ ID NO: 4992 - RNA, 21 nt, synthetic construct
  source 1..21: mol_type = other RNA
tattagagttcaggtcctggc

SEQ ID NO: 4993 - RNA, 21 nt, synthetic construct
  source 1..21: mol_type = other RNA
tattctagaacagggaattga

SEQ ID NO: 4994 - RNA, 21 nt, synthetic construct
  source 1..21: mol_type = other RNA
tattcttcagacagaagagag

SEQ ID NO: 4995 - RNA, 21 nt, synthetic construct
  source 1..21: mol_type = other RNA
tattgcaggataaaggcaggt

SEQ ID NO: 4996 - RNA, 21 nt, synthetic construct
  source 1..21: mol_type = other RNA
tatttatagacagctctaaca

SEQ ID NO: 4997 - RNA, 21 nt, synthetic construct
  source 1..21: mol_type = other RNA
tcaaagccttgcaggtaatgt

SEQ ID NO: 4998 - RNA, 21 nt, synthetic construct
  source 1..21: mol_type = other RNA
tcaaatctcctgttatattct

SEQ ID NO: 4999 - RNA, 21 nt, synthetic construct
  source 1..21: mol_type = other RNA
tcaatgaaattctactgccca

SEQ ID NO: 5000 - RNA, 21 nt, synthetic construct
  source 1..21: mol_type = other RNA
tcaatgtaccctgggcagtag

SEQ ID NO: 5001 - RNA, 21 nt, synthetic construct
  source 1..21: mol_type = other RNA
tcaatgttctccacatagtga

SEQ ID NO: 5002 - RNA, 21 nt, synthetic construct
  source 1..21: mol_type = other RNA
tcaattccctgttctagaata

SEQ ID NO: 5003 - RNA, 21 nt, synthetic construct
  source 1..21: mol_type = other RNA
tcacactgttagtaaattgta

SEQ ID NO: 5004 - RNA, 21 nt, synthetic construct
  source 1..21: mol_type = other RNA
tcactatgtggagaacattga

SEQ ID NO: 5005 - RNA, 21 nt, synthetic construct
  source 1..21: mol_type = other RNA
tcactgtcctgaggactattt

SEQ ID NO: 5006 - RNA, 21 nt, synthetic construct
  source 1..21: mol_type = other RNA
tcagaacatgtccccgtcatt

SEQ ID NO: 5007 - RNA, 21 nt, synthetic construct
  source 1..21: mol_type = other RNA
tcagacagaagagaggagtta

SEQ ID NO: 5008 - RNA, 21 nt, synthetic construct
  source 1..21: mol_type = other RNA
tcagcagagatgtccaatgtg

SEQ ID NO: 5009 - RNA, 21 nt, synthetic construct
  source 1..21: mol_type = other RNA
tcagcatcaatgtaccctggg

SEQ ID NO: 5010 - RNA, 21 nt, synthetic construct
  source 1..21: mol_type = other RNA
tcaggaaggtggatgatctgc

SEQ ID NO: 5011 - RNA, 21 nt, synthetic construct
  source 1..21: mol_type = other RNA
tcaggacagtgaaacaaaaac

SEQ ID NO: 5012 - RNA, 21 nt, synthetic construct
  source 1..21: mol_type = other RNA
tcaggtcctggctctacaatt

SEQ ID NO: 5013 - RNA, 21 nt, synthetic construct
  source 1..21: mol_type = other RNA
tcagtaatatggccatacctg

SEQ ID NO: 5014 - RNA, 21 nt, synthetic construct
  source 1..21: mol_type = other RNA
tcatccaccttcctgatgctc

SEQ ID NO: 5015 - RNA, 21 nt, synthetic construct
  source 1..21: mol_type = other RNA
tcatgccactccacaggagaa

SEQ ID NO: 5016 - RNA, 21 nt, synthetic construct
  source 1..21: mol_type = other RNA
tcatgtgttacttaatgacgg

SEQ ID NO: 5017 - RNA, 21 nt, synthetic construct
  source 1..21: mol_type = other RNA
tcatgttagagctgtctataa

SEQ ID NO: 5018 - RNA, 21 nt, synthetic construct
  source 1..21: mol_type = other RNA
tcatgttcccttctcctgtgg

SEQ ID NO: 5019 - RNA, 21 nt, synthetic construct
  source 1..21: mol_type = other RNA
tcattaagtaacacatgacta

SEQ ID NO: 5020 - RNA, 21 nt, synthetic construct
  source 1..21: mol_type = other RNA
tcattgaaaagcctttggact

SEQ ID NO: 5021 - RNA, 21 nt, synthetic construct
  source 1..21: mol_type = other RNA
tcattttctctcctcagcaga

SEQ ID NO: 5022 - RNA, 21 nt, synthetic construct
  source 1..21: mol_type = other RNA
tccaaaggcttttcaatgaaa

SEQ ID NO: 5023 - RNA, 21 nt, synthetic construct
  source 1..21: mol_type = other RNA
tccaactaaagatgcagagaa

SEQ ID NO: 5024 - RNA, 21 nt, synthetic construct
  source 1..21: mol_type = other RNA
tccaagttcctccctctctct

SEQ ID NO: 5025 - RNA, 21 nt, synthetic construct
  source 1..21: mol_type = other RNA
tccaatgtggaaatggcagaa

SEQ ID NO: 5026 - RNA, 21 nt, synthetic construct
  source 1..21: mol_type = other RNA
tccacaggagaagggaacatg

SEQ ID NO: 5027 - RNA, 21 nt, synthetic construct
  source 1..21: mol_type = other RNA
tccacatagtgagggttatca

SEQ ID NO: 5028 - RNA, 21 nt, synthetic construct
  source 1..21: mol_type = other RNA
tccacattggacatctctgct

SEQ ID NO: 5029 - RNA, 21 nt, synthetic construct
  source 1..21: mol_type = other RNA
tccaccttcctgatgctctcc

SEQ ID NO: 5030 - RNA, 21 nt, synthetic construct
  source 1..21: mol_type = other RNA
tccagaagcaagagagaggga

SEQ ID NO: 5031 - RNA, 21 nt, synthetic construct
  source 1..21: mol_type = other RNA
tcccaaatcaattccctgttc

SEQ ID NO: 5032 - RNA, 21 nt, synthetic construct
  source 1..21: mol_type = other RNA
tcccaggccactagaggagat

SEQ ID NO: 5033 - RNA, 21 nt, synthetic construct
  source 1..21: mol_type = other RNA
tcccattcctgtatggggact

SEQ ID NO: 5034 - RNA, 21 nt, synthetic construct
  source 1..21: mol_type = other RNA
tccccatacaggaatgggatg

SEQ ID NO: 5035 - RNA, 21 nt, synthetic construct
  source 1..21: mol_type = other RNA
tccccgtcattaagtaacaca

SEQ ID NO: 5036 - RNA, 21 nt, synthetic construct
  source 1..21: mol_type = other RNA
tccctctctcttgcttctgga

SEQ ID NO: 5037 - RNA, 21 nt, synthetic construct
  source 1..21: mol_type = other RNA
tccctgctaaaatgttactct

SEQ ID NO: 5038 - RNA, 21 nt, synthetic construct
  source 1..21: mol_type = other RNA
tccctgttctagaatataaca

SEQ ID NO: 5039 - RNA, 21 nt, synthetic construct
  source 1..21: mol_type = other RNA
tcccttctcctgtggagtggc

SEQ ID NO: 5040 - RNA, 21 nt, synthetic construct
  source 1..21: mol_type = other RNA
tccctttatctcctctagtgg

SEQ ID NO: 5041 - RNA, 21 nt, synthetic construct
  source 1..21: mol_type = other RNA
tcctacagggtcatgttccct

SEQ ID NO: 5042 - RNA, 21 nt, synthetic construct
  source 1..21: mol_type = other RNA
tcctagactacaaacctgtac

SEQ ID NO: 5043 - RNA, 21 nt, synthetic construct
  source 1..21: mol_type = other RNA
tcctcagcagagatgtccaat

SEQ ID NO: 5044 - RNA, 21 nt, synthetic construct
  source 1..21: mol_type = other RNA
tcctcaggacagtgaaacaaa

SEQ ID NO: 5045 - RNA, 21 nt, synthetic construct
  source 1..21: mol_type = other RNA
tcctccctctctcttgcttct

SEQ ID NO: 5046 - RNA, 21 nt, synthetic construct
  source 1..21: mol_type = other RNA
tcctctagtggcctgggaacc

SEQ ID NO: 5047 - RNA, 21 nt, synthetic construct
  source 1..21: mol_type = other RNA
tcctctcttctgtctgaagaa

SEQ ID NO: 5048 - RNA, 21 nt, synthetic construct
  source 1..21: mol_type = other RNA
tcctgaggactatttatagac

SEQ ID NO: 5049 - RNA, 21 nt, synthetic construct
  source 1..21: mol_type = other RNA
tcctgatgctctcccaaatca

SEQ ID NO: 5050 - RNA, 21 nt, synthetic construct
  source 1..21: mol_type = other RNA
tcctgcaataccatactggca

SEQ ID NO: 5051 - RNA, 21 nt, synthetic construct
  source 1..21: mol_type = other RNA
tcctggctctacaatttacta

SEQ ID NO: 5052 - RNA, 21 nt, synthetic construct
  source 1..21: mol_type = other RNA
tcctgtatggggactgtgttt

SEQ ID NO: 5053 - RNA, 21 nt, synthetic construct
  source 1..21: mol_type = other RNA
tcctgtggagtggcatgaaga

SEQ ID NO: 5054 - RNA, 21 nt, synthetic construct
  source 1..21: mol_type = other RNA
tcctgttatattctagaacag

SEQ ID NO: 5055 - RNA, 21 nt, synthetic construct
  source 1..21: mol_type = other RNA
tccttgtagttacatctatta

SEQ ID NO: 5056 - RNA, 21 nt, synthetic construct
  source 1..21: mol_type = other RNA
tcctttgccctctctgtagag

SEQ ID NO: 5057 - RNA, 21 nt, synthetic construct
  source 1..21: mol_type = other RNA
tctaacatgataaccctcact

SEQ ID NO: 5058 - RNA, 21 nt, synthetic construct
  source 1..21: mol_type = other RNA
tctaagaggcaaacacagtcc

SEQ ID NO: 5059 - RNA, 21 nt, synthetic construct
  source 1..21: mol_type = other RNA
tctaatatagtcatgtgttac

SEQ ID NO: 5060 - RNA, 21 nt, synthetic construct
  source 1..21: mol_type = other RNA
tctacaatttactaacagtgt

SEQ ID NO: 5061 - RNA, 21 nt, synthetic construct
  source 1..21: mol_type = other RNA
tctacagagagggcaaaggaa

SEQ ID NO: 5062 - RNA, 21 nt, synthetic construct
  source 1..21: mol_type = other RNA
tctactgcccagggtacattg

SEQ ID NO: 5063 - RNA, 21 nt, synthetic construct
  source 1..21: mol_type = other RNA
tctagaacagggaattgattt

SEQ ID NO: 5064 - RNA, 21 nt, synthetic construct
  source 1..21: mol_type = other RNA
tctagaatataacaggagatt

SEQ ID NO: 5065 - RNA, 21 nt, synthetic construct
  source 1..21: mol_type = other RNA
tctaggagcaataggctatac

SEQ ID NO: 5066 - RNA, 21 nt, synthetic construct
  source 1..21: mol_type = other RNA
tctagtggcctgggaacctct

SEQ ID NO: 5067 - RNA, 21 nt, synthetic construct
  source 1..21: mol_type = other RNA
tctataaatagtcctcaggac

SEQ ID NO: 5068 - RNA, 21 nt, synthetic construct
  source 1..21: mol_type = other RNA
tctcagaacatgtccccgtca

SEQ ID NO: 5069 - RNA, 21 nt, synthetic construct
  source 1..21: mol_type = other RNA
tctccacatagtgagggttat

SEQ ID NO: 5070 - RNA, 21 nt, synthetic construct
  source 1..21: mol_type = other RNA
tctcccaaatcaattccctgt

SEQ ID NO: 5071 - RNA, 21 nt, synthetic construct
  source 1..21: mol_type = other RNA
tctcctcagcagagatgtcca

SEQ ID NO: 5072 - RNA, 21 nt, synthetic construct
  source 1..21: mol_type = other RNA
tctcctctagtggcctgggaa

SEQ ID NO: 5073 - RNA, 21 nt, synthetic construct
  source 1..21: mol_type = other RNA
tctcctgtggagtggcatgaa

SEQ ID NO: 5074 - RNA, 21 nt, synthetic construct
  source 1..21: mol_type = other RNA
tctcctgttatattctagaac

SEQ ID NO: 5075 - RNA, 21 nt, synthetic construct
  source 1..21: mol_type = other RNA
tctctcctcagcagagatgtc

SEQ ID NO: 5076 - RNA, 21 nt, synthetic construct
  source 1..21: mol_type = other RNA
tctctcttgcttctggagctc

SEQ ID NO: 5077 - RNA, 21 nt, synthetic construct
  source 1..21: mol_type = other RNA
tctctgcatctttagttggag

SEQ ID NO: 5078 - RNA, 21 nt, synthetic construct
  source 1..21: mol_type = other RNA
tctctgctgaggagagaaaat

SEQ ID NO: 5079 - RNA, 21 nt, synthetic construct
  source 1..21: mol_type = other RNA
tctctgtagagggtcagtaat

SEQ ID NO: 5080 - RNA, 21 nt, synthetic construct
  source 1..21: mol_type = other RNA
tctcttctgtctgaagaataa

SEQ ID NO: 5081 - RNA, 21 nt, synthetic construct
  source 1..21: mol_type = other RNA
tctcttgcttctggagctcct

SEQ ID NO: 5082 - RNA, 21 nt, synthetic construct
  source 1..21: mol_type = other RNA
tctgagaaatgcttacacaaa

SEQ ID NO: 5083 - RNA, 21 nt, synthetic construct
  source 1..21: mol_type = other RNA
tctgcagacatcccattcctg

SEQ ID NO: 5084 - RNA, 21 nt, synthetic construct
  source 1..21: mol_type = other RNA
tctgcagagctgtataactcc

SEQ ID NO: 5085 - RNA, 21 nt, synthetic construct
  source 1..21: mol_type = other RNA
tctgcatctttagttggagtc

SEQ ID NO: 5086 - RNA, 21 nt, synthetic construct
  source 1..21: mol_type = other RNA
tctgccatttccacattggac

SEQ ID NO: 5087 - RNA, 21 nt, synthetic construct
  source 1..21: mol_type = other RNA
tctgcccagtcacactgttag

SEQ ID NO: 5088 - RNA, 21 nt, synthetic construct
  source 1..21: mol_type = other RNA
tctgctgaggagagaaaatga

SEQ ID NO: 5089 - RNA, 21 nt, synthetic construct
  source 1..21: mol_type = other RNA
tctggagctccttgtagttac

SEQ ID NO: 5090 - RNA, 21 nt, synthetic construct
  source 1..21: mol_type = other RNA
tctgtagagggtcagtaatat

SEQ ID NO: 5091 - RNA, 21 nt, synthetic construct
  source 1..21: mol_type = other RNA
tctgtcaatgttctccacata

SEQ ID NO: 5092 - RNA, 21 nt, synthetic construct
  source 1..21: mol_type = other RNA
tctgtctgaagaataaaacaa

SEQ ID NO: 5093 - RNA, 21 nt, synthetic construct
  source 1..21: mol_type = other RNA
tctgtttccctttatctcctc

SEQ ID NO: 5094 - RNA, 21 nt, synthetic construct
  source 1..21: mol_type = other RNA
tcttagaggttcccaggccac

SEQ ID NO: 5095 - RNA, 21 nt, synthetic construct
  source 1..21: mol_type = other RNA
tcttcagacagaagagaggag

SEQ ID NO: 5096 - RNA, 21 nt, synthetic construct
  source 1..21: mol_type = other RNA
tcttcatgccactccacagga

SEQ ID NO: 5097 - RNA, 21 nt, synthetic construct
  source 1..21: mol_type = other RNA
tcttctgccatttccacattg

SEQ ID NO: 5098 - RNA, 21 nt, synthetic construct
  source 1..21: mol_type = other RNA
tcttctgtctgaagaataaaa

SEQ ID NO: 5099 - RNA, 21 nt, synthetic construct
  source 1..21: mol_type = other RNA
tcttctttccctgctaaaatg

SEQ ID NO: 5100 - RNA, 21 nt, synthetic construct
  source 1..21: mol_type = other RNA
tcttgcttctggagctccttg

SEQ ID NO: 5101 - RNA, 21 nt, synthetic construct
  source 1..21: mol_type = other RNA
tctttagttggagtccaaagg

SEQ ID NO: 5102 - RNA, 21 nt, synthetic construct
  source 1..21: mol_type = other RNA
tctttccctgctaaaatgtta

SEQ ID NO: 5103 - RNA, 21 nt, synthetic construct
  source 1..21: mol_type = other RNA
tctttcttctgccatttccac

SEQ ID NO: 5104 - RNA, 21 nt, synthetic construct
  source 1..21: mol_type = other RNA
tgaaaagcctttggactccaa

SEQ ID NO: 5105 - RNA, 21 nt, synthetic construct
  source 1..21: mol_type = other RNA
tgaaaccccattcaaatctcc

SEQ ID NO: 5106 - RNA, 21 nt, synthetic construct
  source 1..21: mol_type = other RNA
tgaaattctactgcccagggt

SEQ ID NO: 5107 - RNA, 21 nt, synthetic construct
  source 1..21: mol_type = other RNA
tgaaccactcttttcctttgt

SEQ ID NO: 5108 - RNA, 21 nt, synthetic construct
  source 1..21: mol_type = other RNA
tgaactctaatatagtcatgt

SEQ ID NO: 5109 - RNA, 21 nt, synthetic construct
  source 1..21: mol_type = other RNA
tgaagaaggtgtatggcccca

SEQ ID NO: 5110 - RNA, 21 nt, synthetic construct
  source 1..21: mol_type = other RNA
tgaatggggtttcagcatcaa

SEQ ID NO: 5111 - RNA, 21 nt, synthetic construct
  source 1..21: mol_type = other RNA
tgacagagtaacattttagca

SEQ ID NO: 5112 - RNA, 21 nt, synthetic construct
  source 1..21: mol_type = other RNA
tgaccctctacagagagggca

SEQ ID NO: 5113 - RNA, 21 nt, synthetic construct
  source 1..21: mol_type = other RNA
tgaccctgtaggattcttctt

SEQ ID NO: 5114 - RNA, 21 nt, synthetic construct
  source 1..21: mol_type = other RNA
tgaccttgagaaaatgttttt

SEQ ID NO: 5115 - RNA, 21 nt, synthetic construct
  source 1..21: mol_type = other RNA
tgacggggacatgttctgaga

SEQ ID NO: 5116 - RNA, 21 nt, synthetic construct
  source 1..21: mol_type = other RNA
tgactatattagagttcaggt

SEQ ID NO: 5117 - RNA, 21 nt, synthetic construct
  source 1..21: mol_type = other RNA
tgactgggcagatcatccacc

SEQ ID NO: 5118 - RNA, 21 nt, synthetic construct
  source 1..21: mol_type = other RNA
tgagaaatgcttacacaaacc

SEQ ID NO: 5119 - RNA, 21 nt, synthetic construct
  source 1..21: mol_type = other RNA
tgaggactatttatagacagc

SEQ ID NO: 5120 - RNA, 21 nt, synthetic construct
  source 1..21: mol_type = other RNA
tgaggagagaaaatgaaccac

SEQ ID NO: 5121 - RNA, 21 nt, synthetic construct
  source 1..21: mol_type = other RNA
tgagggttatcatgttagagc

SEQ ID NO: 5122 - RNA, 21 nt, synthetic construct
  source 1..21: mol_type = other RNA
tgataaccctcactatgtgga

SEQ ID NO: 5123 - RNA, 21 nt, synthetic construct
  source 1..21: mol_type = other RNA
tgatctgcccagtcacactgt

SEQ ID NO: 5124 - RNA, 21 nt, synthetic construct
  source 1..21: mol_type = other RNA
tgatctttcttctgccatttc

SEQ ID NO: 5125 - RNA, 21 nt, synthetic construct
  source 1..21: mol_type = other RNA
tgatgctctcccaaatcaatt

SEQ ID NO: 5126 - RNA, 21 nt, synthetic construct
  source 1..21: mol_type = other RNA
tgatgctgaaaccccattcaa

SEQ ID NO: 5127 - RNA, 21 nt, synthetic construct
  source 1..21: mol_type = other RNA
tgatttgggagagcatcagga

SEQ ID NO: 5128 - RNA, 21 nt, synthetic construct
  source 1..21: mol_type = other RNA
tgcaaggctttgatctttctt

SEQ ID NO: 5129 - RNA, 21 nt, synthetic construct
  source 1..21: mol_type = other RNA
tgcaataccatactggcagtt

SEQ ID NO: 5130 - RNA, 21 nt, synthetic construct
  source 1..21: mol_type = other RNA
tgcagacatcccattcctgta

SEQ ID NO: 5131 - RNA, 21 nt, synthetic construct
  source 1..21: mol_type = other RNA
tgcagagaagtccaagttcct

SEQ ID NO: 5132 - RNA, 21 nt, synthetic construct
  source 1..21: mol_type = other RNA
tgcagagctgtataactcctc

SEQ ID NO: 5133 - RNA, 21 nt, synthetic construct
  source 1..21: mol_type = other RNA
tgcaggataaaggcaggtggt

SEQ ID NO: 5134 - RNA, 21 nt, synthetic construct
  source 1..21: mol_type = other RNA
tgcaggtaatgtgggtaacca

SEQ ID NO: 5135 - RNA, 21 nt, synthetic construct
  source 1..21: mol_type = other RNA
tgcatctttagttggagtcca

SEQ ID NO: 5136 - RNA, 21 nt, synthetic construct
  source 1..21: mol_type = other RNA
tgccactccacaggagaaggg

SEQ ID NO: 5137 - RNA, 21 nt, synthetic construct
  source 1..21: mol_type = other RNA
tgccagtatggtattgcagga

SEQ ID NO: 5138 - RNA, 21 nt, synthetic construct
  source 1..21: mol_type = other RNA
tgccatttccacattggacat

SEQ ID NO: 5139 - RNA, 21 nt, synthetic construct
  source 1..21: mol_type = other RNA
tgcccacagtattcagtacag

SEQ ID NO: 5140 - RNA, 21 nt, synthetic construct
  source 1..21: mol_type = other RNA
tgcccagggtacattgatgct

SEQ ID NO: 5141 - RNA, 21 nt, synthetic construct
  source 1..21: mol_type = other RNA
tgcccagtcacactgttagta

SEQ ID NO: 5142 - RNA, 21 nt, synthetic construct
  source 1..21: mol_type = other RNA
tgccctctctgtagagggtca

SEQ ID NO: 5143 - RNA, 21 nt, synthetic construct
  source 1..21: mol_type = other RNA
tgcctcttagaggttcccagg

SEQ ID NO: 5144 - RNA, 21 nt, synthetic construct
  source 1..21: mol_type = other RNA
tgcctttatcctgcaatacca

SEQ ID NO: 5145 - RNA, 21 nt, synthetic construct
  source 1..21: mol_type = other RNA
tgcgtgtagtaggctacaaca

SEQ ID NO: 5146 - RNA, 21 nt, synthetic construct
  source 1..21: mol_type = other RNA
tgctaaaatgttactctgtca

SEQ ID NO: 5147 - RNA, 21 nt, synthetic construct
  source 1..21: mol_type = other RNA
tgctcctagactacaaacctg

SEQ ID NO: 5148 - RNA, 21 nt, synthetic construct
  source 1..21: mol_type = other RNA
tgctctcccaaatcaattccc

SEQ ID NO: 5149 - RNA, 21 nt, synthetic construct
  source 1..21: mol_type = other RNA
tgctgaaaccccattcaaatc

SEQ ID NO: 5150 - RNA, 21 nt, synthetic construct
  source 1..21: mol_type = other RNA
tgctgaggagagaaaatgaac

SEQ ID NO: 5151 - RNA, 21 nt, synthetic construct
  source 1..21: mol_type = other RNA
tgcttacacaaacctaggtgt

SEQ ID NO: 5152 - RNA, 21 nt, synthetic construct
  source 1..21: mol_type = other RNA
tgcttctggagctccttgtag

SEQ ID NO: 5153 - RNA, 21 nt, synthetic construct
  source 1..21: mol_type = other RNA
tggaaatggcagaagaaagat

SEQ ID NO: 5154 - RNA, 21 nt, synthetic construct
  source 1..21: mol_type = other RNA
tggacatctctgctgaggaga

SEQ ID NO: 5155 - RNA, 21 nt, synthetic construct
  source 1..21: mol_type = other RNA
tggactccaactaaagatgca

SEQ ID NO: 5156 - RNA, 21 nt, synthetic construct
  source 1..21: mol_type = other RNA
tggacttctctgcatctttag

SEQ ID NO: 5157 - RNA, 21 nt, synthetic construct
  source 1..21: mol_type = other RNA
tggagaacattgacagagtaa

SEQ ID NO: 5158 - RNA, 21 nt, synthetic construct
  source 1..21: mol_type = other RNA
tggagctccttgtagttacat

SEQ ID NO: 5159 - RNA, 21 nt, synthetic construct
  source 1..21: mol_type = other RNA
tggagtccaaaggcttttcaa

SEQ ID NO: 5160 - RNA, 21 nt, synthetic construct
  source 1..21: mol_type = other RNA
tggagtggcatgaagaaggtg

SEQ ID NO: 5161 - RNA, 21 nt, synthetic construct
  source 1..21: mol_type = other RNA
tggatgatctgcccagtcaca

SEQ ID NO: 5162 - RNA, 21 nt, synthetic construct
  source 1..21: mol_type = other RNA
tggcagaagaaagatcaaagc

SEQ ID NO: 5163 - RNA, 21 nt, synthetic construct
  source 1..21: mol_type = other RNA
tggcagttcctttgccctctc

SEQ ID NO: 5164 - RNA, 21 nt, synthetic construct
  source 1..21: mol_type = other RNA
tggcatgaagaaggtgtatgg

SEQ ID NO: 5165 - RNA, 21 nt, synthetic construct
  source 1..21: mol_type = other RNA
tggccatacctggggccatac

SEQ ID NO: 5166 - RNA, 21 nt, synthetic construct
  source 1..21: mol_type = other RNA
tggccatattactgaccctct

SEQ ID NO: 5167 - RNA, 21 nt, synthetic construct
  source 1..21: mol_type = other RNA
tggccccaggtatggccatat

SEQ ID NO: 5168 - RNA, 21 nt, synthetic construct
  source 1..21: mol_type = other RNA
tggcctgggaacctctaagag

SEQ ID NO: 5169 - RNA, 21 nt, synthetic construct
  source 1..21: mol_type = other RNA
tggctctacaatttactaaca

SEQ ID NO: 5170 - RNA, 21 nt, synthetic construct
  source 1..21: mol_type = other RNA
tgggaacctctaagaggcaaa

SEQ ID NO: 5171 - RNA, 21 nt, synthetic construct
  source 1..21: mol_type = other RNA
tgggagagcatcaggaaggtg

SEQ ID NO: 5172 - RNA, 21 nt, synthetic construct
  source 1..21: mol_type = other RNA
tgggatgtctgcagagctgta

SEQ ID NO: 5173 - RNA, 21 nt, synthetic construct
  source 1..21: mol_type = other RNA
tgggcagatcatccaccttcc

SEQ ID NO: 5174 - RNA, 21 nt, synthetic construct
  source 1..21: mol_type = other RNA
tgggcagtagaatttcattga

SEQ ID NO: 5175 - RNA, 21 nt, synthetic construct
  source 1..21: mol_type = other RNA
tggggactgtgtttgcctctt

SEQ ID NO: 5176 - RNA, 21 nt, synthetic construct
  source 1..21: mol_type = other RNA
tggggccatacaccttcttca

SEQ ID NO: 5177 - RNA, 21 nt, synthetic construct
  source 1..21: mol_type = other RNA
tggggtttcagcatcaatgta

SEQ ID NO: 5178 - RNA, 21 nt, synthetic construct
  source 1..21: mol_type = other RNA
tgggtaaccacctgcctttat

SEQ ID NO: 5179 - RNA, 21 nt, synthetic construct
  source 1..21: mol_type = other RNA
tggtattgcaggataaaggca

SEQ ID NO: 5180 - RNA, 21 nt, synthetic construct
  source 1..21: mol_type = other RNA
tggttacccacattacctgca

SEQ ID NO: 5181 - RNA, 21 nt, synthetic construct
  source 1..21: mol_type = other RNA
tggttcattttctctcctcag

SEQ ID NO: 5182 - RNA, 21 nt, synthetic construct
  source 1..21: mol_type = other RNA
tgtaactacaaggagctccag

SEQ ID NO: 5183 - RNA, 21 nt, synthetic construct
  source 1..21: mol_type = other RNA
tgtaagcatttctcagaacat

SEQ ID NO: 5184 - RNA, 21 nt, synthetic construct
  source 1..21: mol_type = other RNA
tgtaccctgggcagtagaatt

SEQ ID NO: 5185 - RNA, 21 nt, synthetic construct
  source 1..21: mol_type = other RNA
tgtagagccaggacctgaact

SEQ ID NO: 5186 - RNA, 21 nt, synthetic construct
  source 1..21: mol_type = other RNA
tgtagagggtcagtaatatgg

SEQ ID NO: 5187 - RNA, 21 nt, synthetic construct
  source 1..21: mol_type = other RNA
tgtagcctactacacgcatag

SEQ ID NO: 5188 - RNA, 21 nt, synthetic construct
  source 1..21: mol_type = other RNA
tgtagcctatgcgtgtagtag

SEQ ID NO: 5189 - RNA, 21 nt, synthetic construct
  source 1..21: mol_type = other RNA
tgtaggattcttctttccctg

SEQ ID NO: 5190 - RNA, 21 nt, synthetic construct
  source 1..21: mol_type = other RNA
tgtagtaggctacaacaccta

SEQ ID NO: 5191 - RNA, 21 nt, synthetic construct
  source 1..21: mol_type = other RNA
tgtataactcctctcttctgt

SEQ ID NO: 5192 - RNA, 21 nt, synthetic construct
  source 1..21: mol_type = other RNA
tgtatggccccaggtatggcc

SEQ ID NO: 5193 - RNA, 21 nt, synthetic construct
  source 1..21: mol_type = other RNA
tgtatggggactgtgtttgcc

SEQ ID NO: 5194 - RNA, 21 nt, synthetic construct
  source 1..21: mol_type = other RNA
tgtcaatgttctccacatagt

SEQ ID NO: 5195 - RNA, 21 nt, synthetic construct
  source 1..21: mol_type = other RNA
tgtccaatgtggaaatggcag

SEQ ID NO: 5196 - RNA, 21 nt, synthetic construct
  source 1..21: mol_type = other RNA
tgtccccgtcattaagtaaca

SEQ ID NO: 5197 - RNA, 21 nt, synthetic construct
  source 1..21: mol_type = other RNA
tgtcctgaggactatttatag

SEQ ID NO: 5198 - RNA, 21 nt, synthetic construct
  source 1..21: mol_type = other RNA
tgtctataaatagtcctcagg

SEQ ID NO: 5199 - RNA, 21 nt, synthetic construct
  source 1..21: mol_type = other RNA
tgtctgaagaataaaacaaca

SEQ ID NO: 5200 - RNA, 21 nt, synthetic construct
  source 1..21: mol_type = other RNA
tgtctgcagagctgtataact

SEQ ID NO: 5201 - RNA, 21 nt, synthetic construct
  source 1..21: mol_type = other RNA
tgtgactgggcagatcatcca

SEQ ID NO: 5202 - RNA, 21 nt, synthetic construct
  source 1..21: mol_type = other RNA
tgtggaaatggcagaagaaag

SEQ ID NO: 5203 - RNA, 21 nt, synthetic construct
  source 1..21: mol_type = other RNA
tgtggagaacattgacagagt

SEQ ID NO: 5204 - RNA, 21 nt, synthetic construct
  source 1..21: mol_type = other RNA
tgtggagtggcatgaagaagg

SEQ ID NO: 5205 - RNA, 21 nt, synthetic construct
  source 1..21: mol_type = other RNA
tgtgggtaaccacctgccttt

SEQ ID NO: 5206 - RNA, 21 nt, synthetic construct
  source 1..21: mol_type = other RNA
tgtgtaagcatttctcagaac

SEQ ID NO: 5207 - RNA, 21 nt, synthetic construct
  source 1..21: mol_type = other RNA
tgtgttacttaatgacgggga

SEQ ID NO: 5208 - RNA, 21 nt, synthetic construct
  source 1..21: mol_type = other RNA
tgtgtttgcctcttagaggtt

SEQ ID NO: 5209 - RNA, 21 nt, synthetic construct
  source 1..21: mol_type = other RNA
tgttactctgtcaatgttctc

SEQ ID NO: 5210 - RNA, 21 nt, synthetic construct
  source 1..21: mol_type = other RNA
tgttacttaatgacggggaca

SEQ ID NO: 5211 - RNA, 21 nt, synthetic construct
  source 1..21: mol_type = other RNA
tgttagagctgtctataaata

SEQ ID NO: 5212 - RNA, 21 nt, synthetic construct
  source 1..21: mol_type = other RNA
tgttagtaaattgtagagcca

SEQ ID NO: 5213 - RNA, 21 nt, synthetic construct
  source 1..21: mol_type = other RNA
tgttatattctagaacaggga

SEQ ID NO: 5214 - RNA, 21 nt, synthetic construct
  source 1..21: mol_type = other RNA
tgttcccttctcctgtggagt

SEQ ID NO: 5215 - RNA, 21 nt, synthetic construct
  source 1..21: mol_type = other RNA
tgttctagaatataacaggag

SEQ ID NO: 5216 - RNA, 21 nt, synthetic construct
  source 1..21: mol_type = other RNA
tgttctccacatagtgagggt

SEQ ID NO: 5217 - RNA, 21 nt, synthetic construct
  source 1..21: mol_type = other RNA
tgttctgagaaatgcttacac

SEQ ID NO: 5218 - RNA, 21 nt, synthetic construct
  source 1..21: mol_type = other RNA
tgttgtagcctactacacgca

SEQ ID NO: 5219 - RNA, 21 nt, synthetic construct
  source 1..21: mol_type = other RNA
tgttgttttattcttcagaca

SEQ ID NO: 5220 - RNA, 21 nt, synthetic construct
  source 1..21: mol_type = other RNA
tgtttcactgtcctgaggact

SEQ ID NO: 5221 - RNA, 21 nt, synthetic construct
  source 1..21: mol_type = other RNA
tgtttccctttatctcctcta

SEQ ID NO: 5222 - RNA, 21 nt, synthetic construct
  source 1..21: mol_type = other RNA
tgtttgcctcttagaggttcc

SEQ ID NO: 5223 - RNA, 21 nt, synthetic construct
  source 1..21: mol_type = other RNA
tgttttattcttcagacagaa

SEQ ID NO: 5224 - RNA, 21 nt, synthetic construct
  source 1..21: mol_type = other RNA
tgtttttgtttcactgtcctg

SEQ ID NO: 5225 - RNA, 21 nt, synthetic construct
  source 1..21: mol_type = other RNA
ttaatgacggggacatgttct

SEQ ID NO: 5226 - RNA, 21 nt, synthetic construct
  source 1..21: mol_type = other RNA
ttacacaaacctaggtgttgt

SEQ ID NO: 5227 - RNA, 21 nt, synthetic construct
  source 1..21: mol_type = other RNA
ttacccacattacctgcaagg

SEQ ID NO: 5228 - RNA, 21 nt, synthetic construct
  source 1..21: mol_type = other RNA
ttacctgcaaggctttgatct

SEQ ID NO: 5229 - RNA, 21 nt, synthetic construct
  source 1..21: mol_type = other RNA
ttactaacagtgtgactgggc

SEQ ID NO: 5230 - RNA, 21 nt, synthetic construct
  source 1..21: mol_type = other RNA
ttactctgtcaatgttctcca

SEQ ID NO: 5231 - RNA, 21 nt, synthetic construct
  source 1..21: mol_type = other RNA
ttactgaccctctacagagag

SEQ ID NO: 5232 - RNA, 21 nt, synthetic construct
  source 1..21: mol_type = other RNA
ttacttaatgacggggacatg

SEQ ID NO: 5233 - RNA, 21 nt, synthetic construct
  source 1..21: mol_type = other RNA
ttagagctgtctataaatagt

SEQ ID NO: 5234 - RNA, 21 nt, synthetic construct
  source 1..21: mol_type = other RNA
ttagaggttcccaggccacta

SEQ ID NO: 5235 - RNA, 21 nt, synthetic construct
  source 1..21: mol_type = other RNA
ttagagttcaggtcctggctc

SEQ ID NO: 5236 - RNA, 21 nt, synthetic construct
  source 1..21: mol_type = other RNA
ttagcagggaaagaagaatcc

SEQ ID NO: 5237 - RNA, 21 nt, synthetic construct
  source 1..21: mol_type = other RNA
ttagtaaattgtagagccagg

SEQ ID NO: 5238 - RNA, 21 nt, synthetic construct
  source 1..21: mol_type = other RNA
ttagttggagtccaaaggctt

SEQ ID NO: 5239 - RNA, 21 nt, synthetic construct
  source 1..21: mol_type = other RNA
ttataacaatctgtttccctt

SEQ ID NO: 5240 - RNA, 21 nt, synthetic construct
  source 1..21: mol_type = other RNA
ttatacaaaggaaaagagtgg

SEQ ID NO: 5241 - RNA, 21 nt, synthetic construct
  source 1..21: mol_type = other RNA
ttatacagctctgcagacatc

SEQ ID NO: 5242 - RNA, 21 nt, synthetic construct
  source 1..21: mol_type = other RNA
ttatagacagctctaacatga

SEQ ID NO: 5243 - RNA, 21 nt, synthetic construct
  source 1..21: mol_type = other RNA
ttatattctagaacagggaat

SEQ ID NO: 5244 - RNA, 21 nt, synthetic construct
  source 1..21: mol_type = other RNA
ttatcatgttagagctgtcta

SEQ ID NO: 5245 - RNA, 21 nt, synthetic construct
  source 1..21: mol_type = other RNA
ttatcctgcaataccatactg

SEQ ID NO: 5246 - RNA, 21 nt, synthetic construct
  source 1..21: mol_type = other RNA
ttatctcctctagtggcctgg

SEQ ID NO: 5247 - RNA, 21 nt, synthetic construct
  source 1..21: mol_type = other RNA
ttattcttcagacagaagaga

SEQ ID NO: 5248 - RNA, 21 nt, synthetic construct
  source 1..21: mol_type = other RNA
ttcaaatctcctgttatattc

SEQ ID NO: 5249 - RNA, 21 nt, synthetic construct
  source 1..21: mol_type = other RNA
ttcaatgaaattctactgccc

SEQ ID NO: 5250 - RNA, 21 nt, synthetic construct
  source 1..21: mol_type = other RNA
ttcactgtcctgaggactatt

SEQ ID NO: 5251 - RNA, 21 nt, synthetic construct
  source 1..21: mol_type = other RNA
ttcagacagaagagaggagtt

SEQ ID NO: 5252 - RNA, 21 nt, synthetic construct
  source 1..21: mol_type = other RNA
ttcagcatcaatgtaccctgg

SEQ ID NO: 5253 - RNA, 21 nt, synthetic construct
  source 1..21: mol_type = other RNA
ttcaggtcctggctctacaat

SEQ ID NO: 5254 - RNA, 21 nt, synthetic construct
  source 1..21: mol_type = other RNA
ttcatgccactccacaggaga

SEQ ID NO: 5255 - RNA, 21 nt, synthetic construct
  source 1..21: mol_type = other RNA
ttcattgaaaagcctttggac

SEQ ID NO: 5256 - RNA, 21 nt, synthetic construct
  source 1..21: mol_type = other RNA
ttcattttctctcctcagcag

SEQ ID NO: 5257 - RNA, 21 nt, synthetic construct
  source 1..21: mol_type = other RNA
ttccacattggacatctctgc

SEQ ID NO: 5258 - RNA, 21 nt, synthetic construct
  source 1..21: mol_type = other RNA
ttcccaggccactagaggaga

SEQ ID NO: 5259 - RNA, 21 nt, synthetic construct
  source 1..21: mol_type = other RNA
ttccctgctaaaatgttactc

SEQ ID NO: 5260 - RNA, 21 nt, synthetic construct
  source 1..21: mol_type = other RNA
ttccctgttctagaatataac

SEQ ID NO: 5261 - RNA, 21 nt, synthetic construct
  source 1..21: mol_type = other RNA
ttcccttctcctgtggagtgg

SEQ ID NO: 5262 - RNA, 21 nt, synthetic construct
  source 1..21: mol_type = other RNA
ttccctttatctcctctagtg

SEQ ID NO: 5263 - RNA, 21 nt, synthetic construct
  source 1..21: mol_type = other RNA
ttcctccctctctcttgcttc

SEQ ID NO: 5264 - RNA, 21 nt, synthetic construct
  source 1..21: mol_type = other RNA
ttcctgatgctctcccaaatc

SEQ ID NO: 5265 - RNA, 21 nt, synthetic construct
  source 1..21: mol_type = other RNA
ttcctgtatggggactgtgtt

SEQ ID NO: 5266 - RNA, 21 nt, synthetic construct
  source 1..21: mol_type = other RNA
ttcctttgccctctctgtaga

SEQ ID NO: 5267 - RNA, 21 nt, synthetic construct
  source 1..21: mol_type = other RNA
ttctactgcccagggtacatt

SEQ ID NO: 5268 - RNA, 21 nt, synthetic construct
  source 1..21: mol_type = other RNA
ttctagaacagggaattgatt

SEQ ID NO: 5269 - RNA, 21 nt, synthetic construct
  source 1..21: mol_type = other RNA
ttctagaatataacaggagat

SEQ ID NO: 5270 - RNA, 21 nt, synthetic construct
  source 1..21: mol_type = other RNA
ttctcagaacatgtccccgtc

SEQ ID NO: 5271 - RNA, 21 nt, synthetic construct
  source 1..21: mol_type = other RNA
ttctccacatagtgagggtta

SEQ ID NO: 5272 - RNA, 21 nt, synthetic construct
  source 1..21: mol_type = other RNA
ttctcctgtggagtggcatga

SEQ ID NO: 5273 - RNA, 21 nt, synthetic construct
  source 1..21: mol_type = other RNA
ttctctcctcagcagagatgt

SEQ ID NO: 5274 - RNA, 21 nt, synthetic construct
  source 1..21: mol_type = other RNA
ttctctgcatctttagttgga

SEQ ID NO: 5275 - RNA, 21 nt, synthetic construct
  source 1..21: mol_type = other RNA
ttctgagaaatgcttacacaa

SEQ ID NO: 5276 - RNA, 21 nt, synthetic construct
  source 1..21: mol_type = other RNA
ttctgccatttccacattgga

SEQ ID NO: 5277 - RNA, 21 nt, synthetic construct
  source 1..21: mol_type = other RNA
ttctggagctccttgtagtta

SEQ ID NO: 5278 - RNA, 21 nt, synthetic construct
  source 1..21: mol_type = other RNA
ttctgtctgaagaataaaaca

SEQ ID NO: 5279 - RNA, 21 nt, synthetic construct
  source 1..21: mol_type = other RNA
ttcttcagacagaagagagga

SEQ ID NO: 5280 - RNA, 21 nt, synthetic construct
  source 1..21: mol_type = other RNA
ttcttcatgccactccacagg

SEQ ID NO: 5281 - RNA, 21 nt, synthetic construct
  source 1..21: mol_type = other RNA
ttcttctgccatttccacatt

SEQ ID NO: 5282 - RNA, 21 nt, synthetic construct
  source 1..21: mol_type = other RNA
ttcttctttccctgctaaaat

SEQ ID NO: 5283 - RNA, 21 nt, synthetic construct
  source 1..21: mol_type = other RNA
ttctttccctgctaaaatgtt

SEQ ID NO: 5284 - RNA, 21 nt, synthetic construct
  source 1..21: mol_type = other RNA
ttgaaaagcctttggactcca

SEQ ID NO: 5285 - RNA, 21 nt, synthetic construct
  source 1..21: mol_type = other RNA
ttgaatggggtttcagcatca

SEQ ID NO: 5286 - RNA, 21 nt, synthetic construct
  source 1..21: mol_type = other RNA
ttgacagagtaacattttagc

SEQ ID NO: 5287 - RNA, 21 nt, synthetic construct
  source 1..21: mol_type = other RNA
ttgaccttgagaaaatgtttt

SEQ ID NO: 5288 - RNA, 21 nt, synthetic construct
  source 1..21: mol_type = other RNA
ttgatctttcttctgccattt

SEQ ID NO: 5289 - RNA, 21 nt, synthetic construct
  source 1..21: mol_type = other RNA
ttgatgctgaaaccccattca

SEQ ID NO: 5290 - RNA, 21 nt, synthetic construct
  source 1..21: mol_type = other RNA
ttgatttgggagagcatcagg

SEQ ID NO: 5291 - RNA, 21 nt, synthetic construct
  source 1..21: mol_type = other RNA
ttgcaggataaaggcaggtgg

SEQ ID NO: 5292 - RNA, 21 nt, synthetic construct
  source 1..21: mol_type = other RNA
ttgcaggtaatgtgggtaacc

SEQ ID NO: 5293 - RNA, 21 nt, synthetic construct
  source 1..21: mol_type = other RNA
ttgccctctctgtagagggtc

SEQ ID NO: 5294 - RNA, 21 nt, synthetic construct
  source 1..21: mol_type = other RNA
ttgcctcttagaggttcccag

SEQ ID NO: 5295 - RNA, 21 nt, synthetic construct
  source 1..21: mol_type = other RNA
ttgctcctagactacaaacct

SEQ ID NO: 5296 - RNA, 21 nt, synthetic construct
  source 1..21: mol_type = other RNA
ttgcttctggagctccttgta

SEQ ID NO: 5297 - RNA, 21 nt, synthetic construct
  source 1..21: mol_type = other RNA
ttggacatctctgctgaggag

SEQ ID NO: 5298 - RNA, 21 nt, synthetic construct
  source 1..21: mol_type = other RNA
ttggactccaactaaagatgc

SEQ ID NO: 5299 - RNA, 21 nt, synthetic construct
  source 1..21: mol_type = other RNA
ttggacttctctgcatcttta

SEQ ID NO: 5300 - RNA, 21 nt, synthetic construct
  source 1..21: mol_type = other RNA
ttggagtccaaaggcttttca

SEQ ID NO: 5301 - RNA, 21 nt, synthetic construct
  source 1..21: mol_type = other RNA
ttgggagagcatcaggaaggt

SEQ ID NO: 5302 - RNA, 21 nt, synthetic construct
  source 1..21: mol_type = other RNA
ttgtagagccaggacctgaac

SEQ ID NO: 5303 - RNA, 21 nt, synthetic construct
  source 1..21: mol_type = other RNA
ttgtagcctactacacgcata

SEQ ID NO: 5304 - RNA, 21 nt, synthetic construct
  source 1..21: mol_type = other RNA
ttgtgtaagcatttctcagaa

SEQ ID NO: 5305 - RNA, 21 nt, synthetic construct
  source 1..21: mol_type = other RNA
ttgtttcactgtcctgaggac

SEQ ID NO: 5306 - RNA, 21 nt, synthetic construct
  source 1..21: mol_type = other RNA
ttgttttattcttcagacaga

SEQ ID NO: 5307 - RNA, 21 nt, synthetic construct
  source 1..21: mol_type = other RNA
tttactaacagtgtgactggg

SEQ ID NO: 5308 - RNA, 21 nt, synthetic construct
  source 1..21: mol_type = other RNA
tttagcagggaaagaagaatc

SEQ ID NO: 5309 - RNA, 21 nt, synthetic construct
  source 1..21: mol_type = other RNA
tttagttggagtccaaaggct

SEQ ID NO: 5310 - RNA, 21 nt, synthetic construct
  source 1..21: mol_type = other RNA
tttatagacagctctaacatg

SEQ ID NO: 5311 - RNA, 21 nt, synthetic construct
  source 1..21: mol_type = other RNA
tttatcctgcaataccatact

SEQ ID NO: 5312 - RNA, 21 nt, synthetic construct
  source 1..21: mol_type = other RNA
tttatctcctctagtggcctg

SEQ ID NO: 5313 - RNA, 21 nt, synthetic construct
  source 1..21: mol_type = other RNA
tttattcttcagacagaagag

SEQ ID NO: 5314 - RNA, 21 nt, synthetic construct
  source 1..21: mol_type = other RNA
tttcaatgaaattctactgcc

SEQ ID NO: 5315 - RNA, 21 nt, synthetic construct
  source 1..21: mol_type = other RNA
tttcactgtcctgaggactat

SEQ ID NO: 5316 - RNA, 21 nt, synthetic construct
  source 1..21: mol_type = other RNA
tttcagcatcaatgtaccctg

SEQ ID NO: 5317 - RNA, 21 nt, synthetic construct
  source 1..21: mol_type = other RNA
tttcattgaaaagcctttgga

SEQ ID NO: 5318 - RNA, 21 nt, synthetic construct
  source 1..21: mol_type = other RNA
tttccacattggacatctctg

SEQ ID NO: 5319 - RNA, 21 nt, synthetic construct
  source 1..21: mol_type = other RNA
tttccctgctaaaatgttact

SEQ ID NO: 5320 - RNA, 21 nt, synthetic construct
  source 1..21: mol_type = other RNA
tttccctttatctcctctagt

SEQ ID NO: 5321 - RNA, 21 nt, synthetic construct
  source 1..21: mol_type = other RNA
tttctcagaacatgtccccgt

SEQ ID NO: 5322 - RNA, 21 nt, synthetic construct
  source 1..21: mol_type = other RNA
tttctctcctcagcagagatg

SEQ ID NO: 5323 - RNA, 21 nt, synthetic construct
  source 1..21: mol_type = other RNA
tttcttctgccatttccacat

SEQ ID NO: 5324 - RNA, 21 nt, synthetic construct
  source 1..21: mol_type = other RNA
tttgaatggggtttcagcatc

SEQ ID NO: 5325 - RNA, 21 nt, synthetic construct
  source 1..21: mol_type = other RNA
tttgaccttgagaaaatgttt

SEQ ID NO: 5326 - RNA, 21 nt, synthetic construct
  source 1..21: mol_type = other RNA
tttgatctttcttctgccatt

SEQ ID NO: 5327 - RNA, 21 nt, synthetic construct
  source 1..21: mol_type = other RNA
tttgccctctctgtagagggt

SEQ ID NO: 5328 - RNA, 21 nt, synthetic construct
  source 1..21: mol_type = other RNA
tttgcctcttagaggttccca

SEQ ID NO: 5329 - RNA, 21 nt, synthetic construct
  source 1..21: mol_type = other RNA
tttggactccaactaaagatg

SEQ ID NO: 5330 - RNA, 21 nt, synthetic construct
  source 1..21: mol_type = other RNA
tttgggagagcatcaggaagg

SEQ ID NO: 5331 - RNA, 21 nt, synthetic construct
  source 1..21: mol_type = other RNA
tttgtgtaagcatttctcaga

SEQ ID NO: 5332 - RNA, 21 nt, synthetic construct
  source 1..21: mol_type = other RNA
tttgtttcactgtcctgagga

SEQ ID NO: 5333 - RNA, 21 nt, synthetic construct
  source 1..21: mol_type = other RNA
ttttagcagggaaagaagaat

SEQ ID NO: 5334 - RNA, 21 nt, synthetic construct
  source 1..21: mol_type = other RNA
ttttattcttcagacagaaga

SEQ ID NO: 5335 - RNA, 21 nt, synthetic construct
  source 1..21: mol_type = other RNA
ttttcaatgaaattctactgc

SEQ ID NO: 5336 - RNA, 21 nt, synthetic construct
  source 1..21: mol_type = other RNA
ttttctctcctcagcagagat

SEQ ID NO: 5337 - RNA, 21 nt, synthetic construct
  source 1..21: mol_type = other RNA
ttttgaccttgagaaaatgtt

SEQ ID NO: 5338 - RNA, 21 nt, synthetic construct
  source 1..21: mol_type = other RNA
ttttgtttcactgtcctgagg

SEQ ID NO: 5339 - RNA, 21 nt, synthetic construct
  source 1..21: mol_type = other RNA
tttttgaccttgagaaaatgt

SEQ ID NO: 5340 - RNA, 21 nt, synthetic construct
  source 1..21: mol_type = other RNA
tttttgtttcactgtcctgag

SEQ ID NO: 5341 - RNA, 22 nt, synthetic construct
  source 1..22: mol_type = other RNA
aaaaacattttctcaaggtcaa

SEQ ID NO: 5342 - RNA, 22 nt, synthetic construct
  source 1..22: mol_type = other RNA
aaaagagtggttcattttctct

SEQ ID NO: 5343 - RNA, 22 nt, synthetic construct
  source 1..22: mol_type = other RNA
aaaagcctttggactccaacta

SEQ ID NO: 5344 - RNA, 22 nt, synthetic construct
  source 1..22: mol_type = other RNA
aaaatgaaccactcttttcctt

SEQ ID NO: 5345 - RNA, 22 nt, synthetic construct
  source 1..22: mol_type = other RNA
aaaatgttactctgtcaatgtt

SEQ ID NO: 5346 - RNA, 22 nt, synthetic construct
  source 1..22: mol_type = other RNA
aaaatgtttttgtttcactgtc

SEQ ID NO: 5347 - RNA, 22 nt, synthetic construct
  source 1..22: mol_type = other RNA
aaacaaaaacattttctcaagg

SEQ ID NO: 5348 - RNA, 22 nt, synthetic construct
  source 1..22: mol_type = other RNA
aaacacagtccccatacaggaa

SEQ ID NO: 5349 - RNA, 22 nt, synthetic construct
  source 1..22: mol_type = other RNA
aaaccccattcaaatctcctgt

SEQ ID NO: 5350 - RNA, 22 nt, synthetic construct
  source 1..22: mol_type = other RNA
aaacctaggtgttgtagcctac

SEQ ID NO: 5351 - RNA, 22 nt, synthetic construct
  source 1..22: mol_type = other RNA
aaagaagaatcctacagggtca

SEQ ID NO: 5352 - RNA, 22 nt, synthetic construct
  source 1..22: mol_type = other RNA
aaagagtggttcattttctctc

SEQ ID NO: 5353 - RNA, 22 nt, synthetic construct
  source 1..22: mol_type = other RNA
aaagatcaaagccttgcaggta

SEQ ID NO: 5354 - RNA, 22 nt, synthetic construct
  source 1..22: mol_type = other RNA
aaagatgcagagaagtccaagt

SEQ ID NO: 5355 - RNA, 22 nt, synthetic construct
  source 1..22: mol_type = other RNA
aaagccttgcaggtaatgtggg

SEQ ID NO: 5356 - RNA, 22 nt, synthetic construct
  source 1..22: mol_type = other RNA
aaagcctttggactccaactaa

SEQ ID NO: 5357 - RNA, 22 nt, synthetic construct
  source 1..22: mol_type = other RNA
aaaggaaaagagtggttcattt

SEQ ID NO: 5358 - RNA, 22 nt, synthetic construct
  source 1..22: mol_type = other RNA
aaaggaactgccagtatggtat

SEQ ID NO: 5359 - RNA, 22 nt, synthetic construct
  source 1..22: mol_type = other RNA
aaaggcaggtggttacccacat

SEQ ID NO: 5360 - RNA, 22 nt, synthetic construct
  source 1..22: mol_type = other RNA
aaaggcttttcaatgaaattct

SEQ ID NO: 5361 - RNA, 22 nt, synthetic construct
  source 1..22: mol_type = other RNA
aaagggaaacagattgttataa

SEQ ID NO: 5362 - RNA, 22 nt, synthetic construct
  source 1..22: mol_type = other RNA
aaatagtcctcaggacagtgaa

SEQ ID NO: 5363 - RNA, 22 nt, synthetic construct
  source 1..22: mol_type = other RNA
aaatcaattccctgttctagaa

SEQ ID NO: 5364 - RNA, 22 nt, synthetic construct
  source 1..22: mol_type = other RNA
aaatctcctgttatattctaga

SEQ ID NO: 5365 - RNA, 22 nt, synthetic construct
  source 1..22: mol_type = other RNA
aaatgaaccactcttttccttt

SEQ ID NO: 5366 - RNA, 22 nt, synthetic construct
  source 1..22: mol_type = other RNA
aaatgcttacacaaacctaggt

SEQ ID NO: 5367 - RNA, 22 nt, synthetic construct
  source 1..22: mol_type = other RNA
aaatggcagaagaaagatcaaa

SEQ ID NO: 5368 - RNA, 22 nt, synthetic construct
  source 1..22: mol_type = other RNA
aaatgttactctgtcaatgttc

SEQ ID NO: 5369 - RNA, 22 nt, synthetic construct
  source 1..22: mol_type = other RNA
aaatgtttttgtttcactgtcc

SEQ ID NO: 5370 - RNA, 22 nt, synthetic construct
  source 1..22: mol_type = other RNA
aaattctactgcccagggtaca

SEQ ID NO: 5371 - RNA, 22 nt, synthetic construct
  source 1..22: mol_type = other RNA
aaattgtagagccaggacctga

SEQ ID NO: 5372 - RNA, 22 nt, synthetic construct
  source 1..22: mol_type = other RNA
aacaaaaacattttctcaaggt

SEQ ID NO: 5373 - RNA, 22 nt, synthetic construct
  source 1..22: mol_type = other RNA
aacaatctgtttccctttatct

SEQ ID NO: 5374 - RNA, 22 nt, synthetic construct
  source 1..22: mol_type = other RNA
aacacagtccccatacaggaat

SEQ ID NO: 5375 - RNA, 22 nt, synthetic construct
  source 1..22: mol_type = other RNA
aacacatgactatattagagtt

SEQ ID NO: 5376 - RNA, 22 nt, synthetic construct
  source 1..22: mol_type = other RNA
aacacctaggtttgtgtaagca

SEQ ID NO: 5377 - RNA, 22 nt, synthetic construct
  source 1..22: mol_type = other RNA
aacaggagatttgaatggggtt

SEQ ID NO: 5378 - RNA, 22 nt, synthetic construct
  source 1..22: mol_type = other RNA
aacaggctgtacaggtttgtag

SEQ ID NO: 5379 - RNA, 22 nt, synthetic construct
  source 1..22: mol_type = other RNA
aacagggaattgatttgggaga

SEQ ID NO: 5380 - RNA, 22 nt, synthetic construct
  source 1..22: mol_type = other RNA
aacagtgtgactgggcagatca

SEQ ID NO: 5381 - RNA, 22 nt, synthetic construct
  source 1..22: mol_type = other RNA
aacatgaccctgtaggattctt

SEQ ID NO: 5382 - RNA, 22 nt, synthetic construct
  source 1..22: mol_type = other RNA
aacatgataaccctcactatgt

SEQ ID NO: 5383 - RNA, 22 nt, synthetic construct
  source 1..22: mol_type = other RNA
aacatgtccccgtcattaagta

SEQ ID NO: 5384 - RNA, 22 nt, synthetic construct
  source 1..22: mol_type = other RNA
aacattatacaaaggaaaagag

SEQ ID NO: 5385 - RNA, 22 nt, synthetic construct
  source 1..22: mol_type = other RNA
aacattgacagagtaacatttt

SEQ ID NO: 5386 - RNA, 22 nt, synthetic construct
  source 1..22: mol_type = other RNA
aacattttagcagggaaagaag

SEQ ID NO: 5387 - RNA, 22 nt, synthetic construct
  source 1..22: mol_type = other RNA
aaccacctgcctttatcctgca

SEQ ID NO: 5388 - RNA, 22 nt, synthetic construct
  source 1..22: mol_type = other RNA
aaccactcttttcctttgtata

SEQ ID NO: 5389 - RNA, 22 nt, synthetic construct
  source 1..22: mol_type = other RNA
aaccccattcaaatctcctgtt

SEQ ID NO: 5390 - RNA, 22 nt, synthetic construct
  source 1..22: mol_type = other RNA
aaccctcactatgtggagaaca

SEQ ID NO: 5391 - RNA, 22 nt, synthetic construct
  source 1..22: mol_type = other RNA
aacctaggtgttgtagcctact

SEQ ID NO: 5392 - RNA, 22 nt, synthetic construct
  source 1..22: mol_type = other RNA
aacctctaagaggcaaacacag

SEQ ID NO: 5393 - RNA, 22 nt, synthetic construct
  source 1..22: mol_type = other RNA
aactaaagatgcagagaagtcc

SEQ ID NO: 5394 - RNA, 22 nt, synthetic construct
  source 1..22: mol_type = other RNA
aactacaaggagctccagaagc

SEQ ID NO: 5395 - RNA, 22 nt, synthetic construct
  source 1..22: mol_type = other RNA
aactcctctcttctgtctgaag

SEQ ID NO: 5396 - RNA, 22 nt, synthetic construct
  source 1..22: mol_type = other RNA
aactctaatatagtcatgtgtt

SEQ ID NO: 5397 - RNA, 22 nt, synthetic construct
  source 1..22: mol_type = other RNA
aactgccagtatggtattgcag

SEQ ID NO: 5398 - RNA, 22 nt, synthetic construct
  source 1..22: mol_type = other RNA
aactgcccacagtattcagtac

SEQ ID NO: 5399 - RNA, 22 nt, synthetic construct
  source 1..22: mol_type = other RNA
aacttggacttctctgcatctt

SEQ ID NO: 5400 - RNA, 22 nt, synthetic construct
  source 1..22: mol_type = other RNA
aagaaagatcaaagccttgcag

SEQ ID NO: 5401 - RNA, 22 nt, synthetic construct
  source 1..22: mol_type = other RNA
aagaagaatcctacagggtcat

SEQ ID NO: 5402 - RNA, 22 nt, synthetic construct
  source 1..22: mol_type = other RNA
aagaaggtgtatggccccaggt

SEQ ID NO: 5403 - RNA, 22 nt, synthetic construct
  source 1..22: mol_type = other RNA
aagaatcctacagggtcatgtt

SEQ ID NO: 5404 - RNA, 22 nt, synthetic construct
  source 1..22: mol_type = other RNA
aagagagagggaggaacttgga

SEQ ID NO: 5405 - RNA, 22 nt, synthetic construct
  source 1..22: mol_type = other RNA
aagagaggagttatacagctct

SEQ ID NO: 5406 - RNA, 22 nt, synthetic construct
  source 1..22: mol_type = other RNA
aagaggcaaacacagtccccat

SEQ ID NO: 5407 - RNA, 22 nt, synthetic construct
  source 1..22: mol_type = other RNA
aagagtggttcattttctctcc

SEQ ID NO: 5408 - RNA, 22 nt, synthetic construct
  source 1..22: mol_type = other RNA
aagatcaaagccttgcaggtaa

SEQ ID NO: 5409 - RNA, 22 nt, synthetic construct
  source 1..22: mol_type = other RNA
aagatgcagagaagtccaagtt

SEQ ID NO: 5410 - RNA, 22 nt, synthetic construct
  source 1..22: mol_type = other RNA
aagcaagagagagggaggaact

SEQ ID NO: 5411 - RNA, 22 nt, synthetic construct
  source 1..22: mol_type = other RNA
aagcatttctcagaacatgtcc

SEQ ID NO: 5412 - RNA, 22 nt, synthetic construct
  source 1..22: mol_type = other RNA
aagccttgcaggtaatgtgggt

SEQ ID NO: 5413 - RNA, 22 nt, synthetic construct
  source 1..22: mol_type = other RNA
aagcctttggactccaactaaa

SEQ ID NO: 5414 - RNA, 22 nt, synthetic construct
  source 1..22: mol_type = other RNA
aaggaaaagagtggttcatttt

SEQ ID NO: 5415 - RNA, 22 nt, synthetic construct
  source 1..22: mol_type = other RNA
aaggaactgccagtatggtatt

SEQ ID NO: 5416 - RNA, 22 nt, synthetic construct
  source 1..22: mol_type = other RNA
aaggagctccagaagcaagaga

SEQ ID NO: 5417 - RNA, 22 nt, synthetic construct
  source 1..22: mol_type = other RNA
aaggcaggtggttacccacatt

SEQ ID NO: 5418 - RNA, 22 nt, synthetic construct
  source 1..22: mol_type = other RNA
aaggctttgatctttcttctgc

SEQ ID NO: 5419 - RNA, 22 nt, synthetic construct
  source 1..22: mol_type = other RNA
aaggcttttcaatgaaattcta

SEQ ID NO: 5420 - RNA, 22 nt, synthetic construct
  source 1..22: mol_type = other RNA
aagggaaacagattgttataac

SEQ ID NO: 5421 - RNA, 22 nt, synthetic construct
  source 1..22: mol_type = other RNA
aagggaacatgaccctgtagga

SEQ ID NO: 5422 - RNA, 22 nt, synthetic construct
  source 1..22: mol_type = other RNA
aaggtggatgatctgcccagtc

SEQ ID NO: 5423 - RNA, 22 nt, synthetic construct
  source 1..22: mol_type = other RNA
aaggtgtatggccccaggtatg

SEQ ID NO: 5424 - RNA, 22 nt, synthetic construct
  source 1..22: mol_type = other RNA
aagtaacacatgactatattag

SEQ ID NO: 5425 - RNA, 22 nt, synthetic construct
  source 1..22: mol_type = other RNA
aagtccaagttcctccctctct

SEQ ID NO: 5426 - RNA, 22 nt, synthetic construct
  source 1..22: mol_type = other RNA
aagttataacaatctgtttccc

SEQ ID NO: 5427 - RNA, 22 nt, synthetic construct
  source 1..22: mol_type = other RNA
aagttcctccctctctcttgct

SEQ ID NO: 5428 - RNA, 22 nt, synthetic construct
  source 1..22: mol_type = other RNA
aagtttttgaccttgagaaaat

SEQ ID NO: 5429 - RNA, 22 nt, synthetic construct
  source 1..22: mol_type = other RNA
aataccatactggcagttcctt

SEQ ID NO: 5430 - RNA, 22 nt, synthetic construct
  source 1..22: mol_type = other RNA
aatagatgtaactacaaggagc

SEQ ID NO: 5431 - RNA, 22 nt, synthetic construct
  source 1..22: mol_type = other RNA
aataggctataccatgtagcct

SEQ ID NO: 5432 - RNA, 22 nt, synthetic construct
  source 1..22: mol_type = other RNA
aatagtcctcaggacagtgaaa

SEQ ID NO: 5433 - RNA, 22 nt, synthetic construct
  source 1..22: mol_type = other RNA
aatataacaggagatttgaatg

SEQ ID NO: 5434 - RNA, 22 nt, synthetic construct
  source 1..22: mol_type = other RNA
aatatggccatacctggggcca

SEQ ID NO: 5435 - RNA, 22 nt, synthetic construct
  source 1..22: mol_type = other RNA
aatcaattccctgttctagaat

SEQ ID NO: 5436 - RNA, 22 nt, synthetic construct
  source 1..22: mol_type = other RNA
aatcctacagggtcatgttccc

SEQ ID NO: 5437 - RNA, 22 nt, synthetic construct
  source 1..22: mol_type = other RNA
aatctcctgttatattctagaa

SEQ ID NO: 5438 - RNA, 22 nt, synthetic construct
  source 1..22: mol_type = other RNA
aatctgtttccctttatctcct

SEQ ID NO: 5439 - RNA, 22 nt, synthetic construct
  source 1..22: mol_type = other RNA
aatgaaattctactgcccaggg

SEQ ID NO: 5440 - RNA, 22 nt, synthetic construct
  source 1..22: mol_type = other RNA
aatgaaccactcttttcctttg

SEQ ID NO: 5441 - RNA, 22 nt, synthetic construct
  source 1..22: mol_type = other RNA
aatgacggggacatgttctgag

SEQ ID NO: 5442 - RNA, 22 nt, synthetic construct
  source 1..22: mol_type = other RNA
aatgcttacacaaacctaggtg

SEQ ID NO: 5443 - RNA, 22 nt, synthetic construct
  source 1..22: mol_type = other RNA
aatggcagaagaaagatcaaag

SEQ ID NO: 5444 - RNA, 22 nt, synthetic construct
  source 1..22: mol_type = other RNA
aatgggatgtctgcagagctgt

SEQ ID NO: 5445 - RNA, 22 nt, synthetic construct
  source 1..22: mol_type = other RNA
aatggggtttcagcatcaatgt

SEQ ID NO: 5446 - RNA, 22 nt, synthetic construct
  source 1..22: mol_type = other RNA
aatgtaccctgggcagtagaat

SEQ ID NO: 5447 - RNA, 22 nt, synthetic construct
  source 1..22: mol_type = other RNA
aatgtggaaatggcagaagaaa

SEQ ID NO: 5448 - RNA, 22 nt, synthetic construct
  source 1..22: mol_type = other RNA
aatgtgggtaaccacctgcctt

SEQ ID NO: 5449 - RNA, 22 nt, synthetic construct
  source 1..22: mol_type = other RNA
aatgttactctgtcaatgttct

SEQ ID NO: 5450 - RNA, 22 nt, synthetic construct
  source 1..22: mol_type = other RNA
aatgttctccacatagtgaggg

SEQ ID NO: 5451 - RNA, 22 nt, synthetic construct
  source 1..22: mol_type = other RNA
aatgttgttttattcttcagac

SEQ ID NO: 5452 - RNA, 22 nt, synthetic construct
  source 1..22: mol_type = other RNA
aatgtttttgtttcactgtcct

SEQ ID NO: 5453 - RNA, 22 nt, synthetic construct
  source 1..22: mol_type = other RNA
aattccctgttctagaatataa

SEQ ID NO: 5454 - RNA, 22 nt, synthetic construct
  source 1..22: mol_type = other RNA
aattctactgcccagggtacat

SEQ ID NO: 5455 - RNA, 22 nt, synthetic construct
  source 1..22: mol_type = other RNA
aattgatttgggagagcatcag

SEQ ID NO: 5456 - RNA, 22 nt, synthetic construct
  source 1..22: mol_type = other RNA
aattgtagagccaggacctgaa

SEQ ID NO: 5457 - RNA, 22 nt, synthetic construct
  source 1..22: mol_type = other RNA
aatttactaacagtgtgactgg

SEQ ID NO: 5458 - RNA, 22 nt, synthetic construct
  source 1..22: mol_type = other RNA
aatttcattgaaaagcctttgg

SEQ ID NO: 5459 - RNA, 22 nt, synthetic construct
  source 1..22: mol_type = other RNA
acaaaaacattttctcaaggtc

SEQ ID NO: 5460 - RNA, 22 nt, synthetic construct
  source 1..22: mol_type = other RNA
acaaacctaggtgttgtagcct

SEQ ID NO: 5461 - RNA, 22 nt, synthetic construct
  source 1..22: mol_type = other RNA
acaaaggaaaagagtggttcat

SEQ ID NO: 5462 - RNA, 22 nt, synthetic construct
  source 1..22: mol_type = other RNA
acaacacctaggtttgtgtaag

SEQ ID NO: 5463 - RNA, 22 nt, synthetic construct
  source 1..22: mol_type = other RNA
acaacattatacaaaggaaaag

SEQ ID NO: 5464 - RNA, 22 nt, synthetic construct
  source 1..22: mol_type = other RNA
acaaggagctccagaagcaaga

SEQ ID NO: 5465 - RNA, 22 nt, synthetic construct
  source 1..22: mol_type = other RNA
acaatctgtttccctttatctc

SEQ ID NO: 5466 - RNA, 22 nt, synthetic construct
  source 1..22: mol_type = other RNA
acaatttactaacagtgtgact

SEQ ID NO: 5467 - RNA, 22 nt, synthetic construct
  source 1..22: mol_type = other RNA
acacaaacctaggtgttgtagc

SEQ ID NO: 5468 - RNA, 22 nt, synthetic construct
  source 1..22: mol_type = other RNA
acacagtccccatacaggaatg

SEQ ID NO: 5469 - RNA, 22 nt, synthetic construct
  source 1..22: mol_type = other RNA
acacatgactatattagagttc

SEQ ID NO: 5470 - RNA, 22 nt, synthetic construct
  source 1..22: mol_type = other RNA
acacctaggtttgtgtaagcat

SEQ ID NO: 5471 - RNA, 22 nt, synthetic construct
  source 1..22: mol_type = other RNA
acaccttcttcatgccactcca

SEQ ID NO: 5472 - RNA, 22 nt, synthetic construct
  source 1..22: mol_type = other RNA
acacgcataggctacatggtat

SEQ ID NO: 5473 - RNA, 22 nt, synthetic construct
  source 1..22: mol_type = other RNA
acactgttagtaaattgtagag

SEQ ID NO: 5474 - RNA, 22 nt, synthetic construct
  source 1..22: mol_type = other RNA
acagaagagaggagttatacag

SEQ ID NO: 5475 - RNA, 22 nt, synthetic construct
  source 1..22: mol_type = other RNA
acagagagggcaaaggaactgc

SEQ ID NO: 5476 - RNA, 22 nt, synthetic construct
  source 1..22: mol_type = other RNA
acagagtaacattttagcaggg

SEQ ID NO: 5477 - RNA, 22 nt, synthetic construct
  source 1..22: mol_type = other RNA
acagcctgttactgtactgaat

SEQ ID NO: 5478 - RNA, 22 nt, synthetic construct
  source 1..22: mol_type = other RNA
acagctctaacatgataaccct

SEQ ID NO: 5479 - RNA, 22 nt, synthetic construct
  source 1..22: mol_type = other RNA
acagctctgcagacatcccatt

SEQ ID NO: 5480 - RNA, 22 nt, synthetic construct
  source 1..22: mol_type = other RNA
acaggaatgggatgtctgcaga

SEQ ID NO: 5481 - RNA, 22 nt, synthetic construct
  source 1..22: mol_type = other RNA
acaggagaagggaacatgaccc

SEQ ID NO: 5482 - RNA, 22 nt, synthetic construct
  source 1..22: mol_type = other RNA
acaggagatttgaatggggttt

SEQ ID NO: 5483 - RNA, 22 nt, synthetic construct
  source 1..22: mol_type = other RNA
acaggctgtacaggtttgtagt

SEQ ID NO: 5484 - RNA, 22 nt, synthetic construct
  source 1..22: mol_type = other RNA
acagggaattgatttgggagag

SEQ ID NO: 5485 - RNA, 22 nt, synthetic construct
  source 1..22: mol_type = other RNA
acagggtcatgttcccttctcc

SEQ ID NO: 5486 - RNA, 22 nt, synthetic construct
  source 1..22: mol_type = other RNA
acagtaacaggctgtacaggtt

SEQ ID NO: 5487 - RNA, 22 nt, synthetic construct
  source 1..22: mol_type = other RNA
acagtccccatacaggaatggg

SEQ ID NO: 5488 - RNA, 22 nt, synthetic construct
  source 1..22: mol_type = other RNA
acagtgaaacaaaaacattttc

SEQ ID NO: 5489 - RNA, 22 nt, synthetic construct
  source 1..22: mol_type = other RNA
acagtgtgactgggcagatcat

SEQ ID NO: 5490 - RNA, 22 nt, synthetic construct
  source 1..22: mol_type = other RNA
acatagtgagggttatcatgtt

SEQ ID NO: 5491 - RNA, 22 nt, synthetic construct
  source 1..22: mol_type = other RNA
acatcccattcctgtatgggga

SEQ ID NO: 5492 - RNA, 22 nt, synthetic construct
  source 1..22: mol_type = other RNA
acatctctgctgaggagagaaa

SEQ ID NO: 5493 - RNA, 22 nt, synthetic construct
  source 1..22: mol_type = other RNA
acatgaccctgtaggattcttc

SEQ ID NO: 5494 - RNA, 22 nt, synthetic construct
  source 1..22: mol_type = other RNA
acatgactatattagagttcag

SEQ ID NO: 5495 - RNA, 22 nt, synthetic construct
  source 1..22: mol_type = other RNA
acatgataaccctcactatgtg

SEQ ID NO: 5496 - RNA, 22 nt, synthetic construct
  source 1..22: mol_type = other RNA
acatggtatagcctattgctcc

SEQ ID NO: 5497 - RNA, 22 nt, synthetic construct
  source 1..22: mol_type = other RNA
acatgtccccgtcattaagtaa

SEQ ID NO: 5498 - RNA, 22 nt, synthetic construct
  source 1..22: mol_type = other RNA
acatgttctgagaaatgcttac

SEQ ID NO: 5499 - RNA, 22 nt, synthetic construct
  source 1..22: mol_type = other RNA
acattacctgcaaggctttgat

SEQ ID NO: 5500 - RNA, 22 nt, synthetic construct
  source 1..22: mol_type = other RNA
acattatacaaaggaaaagagt

SEQ ID NO: 5501 - RNA, 22 nt, synthetic construct
  source 1..22: mol_type = other RNA
acattgacagagtaacatttta

SEQ ID NO: 5502 - RNA, 22 nt, synthetic construct
  source 1..22: mol_type = other RNA
acattgatgctgaaaccccatt

SEQ ID NO: 5503 - RNA, 22 nt, synthetic construct
  source 1..22: mol_type = other RNA
acattggacatctctgctgagg

SEQ ID NO: 5504 - RNA, 22 nt, synthetic construct
  source 1..22: mol_type = other RNA
acattttagcagggaaagaaga

SEQ ID NO: 5505 - RNA, 22 nt, synthetic construct
  source 1..22: mol_type = other RNA
accacctgcctttatcctgcaa

SEQ ID NO: 5506 - RNA, 22 nt, synthetic construct
  source 1..22: mol_type = other RNA
accactcttttcctttgtataa

SEQ ID NO: 5507 - RNA, 22 nt, synthetic construct
  source 1..22: mol_type = other RNA
accatactggcagttcctttgc

SEQ ID NO: 5508 - RNA, 22 nt, synthetic construct
  source 1..22: mol_type = other RNA
accatgtagcctatgcgtgtag

SEQ ID NO: 5509 - RNA, 22 nt, synthetic construct
  source 1..22: mol_type = other RNA
acccacattacctgcaaggctt

SEQ ID NO: 5510 - RNA, 22 nt, synthetic construct
  source 1..22: mol_type = other RNA
accccattcaaatctcctgtta

SEQ ID NO: 5511 - RNA, 22 nt, synthetic construct
  source 1..22: mol_type = other RNA
accctcactatgtggagaacat

SEQ ID NO: 5512 - RNA, 22 nt, synthetic construct
  source 1..22: mol_type = other RNA
accctctacagagagggcaaag

SEQ ID NO: 5513 - RNA, 22 nt, synthetic construct
  source 1..22: mol_type = other RNA
accctgggcagtagaatttcat

SEQ ID NO: 5514 - RNA, 22 nt, synthetic construct
  source 1..22: mol_type = other RNA
accctgtaggattcttctttcc

SEQ ID NO: 5515 - RNA, 22 nt, synthetic construct
  source 1..22: mol_type = other RNA
acctaggtgttgtagcctacta

SEQ ID NO: 5516 - RNA, 22 nt, synthetic construct
  source 1..22: mol_type = other RNA
acctaggtttgtgtaagcattt

SEQ ID NO: 5517 - RNA, 22 nt, synthetic construct
  source 1..22: mol_type = other RNA
acctctaagaggcaaacacagt

SEQ ID NO: 5518 - RNA, 22 nt, synthetic construct
  source 1..22: mol_type = other RNA
acctgaactctaatatagtcat

SEQ ID NO: 5519 - RNA, 22 nt, synthetic construct
  source 1..22: mol_type = other RNA
acctgcaaggctttgatctttc

SEQ ID NO: 5520 - RNA, 22 nt, synthetic construct
  source 1..22: mol_type = other RNA
acctgcctttatcctgcaatac

SEQ ID NO: 5521 - RNA, 22 nt, synthetic construct
  source 1..22: mol_type = other RNA
acctggggccatacaccttctt

SEQ ID NO: 5522 - RNA, 22 nt, synthetic construct
  source 1..22: mol_type = other RNA
accttcctgatgctctcccaaa

SEQ ID NO: 5523 - RNA, 22 nt, synthetic construct
  source 1..22: mol_type = other RNA
accttcttcatgccactccaca

SEQ ID NO: 5524 - RNA, 22 nt, synthetic construct
  source 1..22: mol_type = other RNA
accttgagaaaatgtttttgtt

SEQ ID NO: 5525 - RNA, 22 nt, synthetic construct
  source 1..22: mol_type = other RNA
acgcataggctacatggtatag

SEQ ID NO: 5526 - RNA, 22 nt, synthetic construct
  source 1..22: mol_type = other RNA
acggggacatgttctgagaaat

SEQ ID NO: 5527 - RNA, 22 nt, synthetic construct
  source 1..22: mol_type = other RNA
actaaagatgcagagaagtcca

SEQ ID NO: 5528 - RNA, 22 nt, synthetic construct
  source 1..22: mol_type = other RNA
actaacagtgtgactgggcaga

SEQ ID NO: 5529 - RNA, 22 nt, synthetic construct
  source 1..22: mol_type = other RNA
actacaaacctgtacagcctgt

SEQ ID NO: 5530 - RNA, 22 nt, synthetic construct
  source 1..22: mol_type = other RNA
actacaaggagctccagaagca

SEQ ID NO: 5531 - RNA, 22 nt, synthetic construct
  source 1..22: mol_type = other RNA
actacacgcataggctacatgg

SEQ ID NO: 5532 - RNA, 22 nt, synthetic construct
  source 1..22: mol_type = other RNA
actagaggagataaagggaaac

SEQ ID NO: 5533 - RNA, 22 nt, synthetic construct
  source 1..22: mol_type = other RNA
actatattagagttcaggtcct

SEQ ID NO: 5534 - RNA, 22 nt, synthetic construct
  source 1..22: mol_type = other RNA
actatgtggagaacattgacag

SEQ ID NO: 5535 - RNA, 22 nt, synthetic construct
  source 1..22: mol_type = other RNA
actatttatagacagctctaac

SEQ ID NO: 5536 - RNA, 22 nt, synthetic construct
  source 1..22: mol_type = other RNA
actccaactaaagatgcagaga

SEQ ID NO: 5537 - RNA, 22 nt, synthetic construct
  source 1..22: mol_type = other RNA
actccacaggagaagggaacat

SEQ ID NO: 5538 - RNA, 22 nt, synthetic construct
  source 1..22: mol_type = other RNA
actcctctcttctgtctgaaga

SEQ ID NO: 5539 - RNA, 22 nt, synthetic construct
  source 1..22: mol_type = other RNA
actctaatatagtcatgtgtta

SEQ ID NO: 5540 - RNA, 22 nt, synthetic construct
  source 1..22: mol_type = other RNA
actctgtcaatgttctccacat

SEQ ID NO: 5541 - RNA, 22 nt, synthetic construct
  source 1..22: mol_type = other RNA
actcttttcctttgtataatgt

SEQ ID NO: 5542 - RNA, 22 nt, synthetic construct
  source 1..22: mol_type = other RNA
actgaccctctacagagagggc

SEQ ID NO: 5543 - RNA, 22 nt, synthetic construct
  source 1..22: mol_type = other RNA
actgccagtatggtattgcagg

SEQ ID NO: 5544 - RNA, 22 nt, synthetic construct
  source 1..22: mol_type = other RNA
actgcccacagtattcagtaca

SEQ ID NO: 5545 - RNA, 22 nt, synthetic construct
  source 1..22: mol_type = other RNA
actgcccagggtacattgatgc

SEQ ID NO: 5546 - RNA, 22 nt, synthetic construct
  source 1..22: mol_type = other RNA
actggcagttcctttgccctct

SEQ ID NO: 5547 - RNA, 22 nt, synthetic construct
  source 1..22: mol_type = other RNA
actgggcagatcatccaccttc

SEQ ID NO: 5548 - RNA, 22 nt, synthetic construct
  source 1..22: mol_type = other RNA
actgtcctgaggactatttata

SEQ ID NO: 5549 - RNA, 22 nt, synthetic construct
  source 1..22: mol_type = other RNA
actgtgtttgcctcttagaggt

SEQ ID NO: 5550 - RNA, 22 nt, synthetic construct
  source 1..22: mol_type = other RNA
actgttagtaaattgtagagcc

SEQ ID NO: 5551 - RNA, 22 nt, synthetic construct
  source 1..22: mol_type = other RNA
acttaatgacggggacatgttc

SEQ ID NO: 5552 - RNA, 22 nt, synthetic construct
  source 1..22: mol_type = other RNA
acttctctgcatctttagttgg

SEQ ID NO: 5553 - RNA, 22 nt, synthetic construct
  source 1..22: mol_type = other RNA
acttggacttctctgcatcttt

SEQ ID NO: 5554 - RNA, 22 nt, synthetic construct
  source 1..22: mol_type = other RNA
agaaaatgaaccactcttttcc

SEQ ID NO: 5555 - RNA, 22 nt, synthetic construct
  source 1..22: mol_type = other RNA
agaaaatgtttttgtttcactg

SEQ ID NO: 5556 - RNA, 22 nt, synthetic construct
  source 1..22: mol_type = other RNA
agaaagatcaaagccttgcagg

SEQ ID NO: 5557 - RNA, 22 nt, synthetic construct
  source 1..22: mol_type = other RNA
agaaatgcttacacaaacctag

SEQ ID NO: 5558 - RNA, 22 nt, synthetic construct
  source 1..22: mol_type = other RNA
agaacagggaattgatttggga

SEQ ID NO: 5559 - RNA, 22 nt, synthetic construct
  source 1..22: mol_type = other RNA
agaacatgtccccgtcattaag

SEQ ID NO: 5560 - RNA, 22 nt, synthetic construct
  source 1..22: mol_type = other RNA
agaacattgacagagtaacatt

SEQ ID NO: 5561 - RNA, 22 nt, synthetic construct
  source 1..22: mol_type = other RNA
agaagaaagatcaaagccttgc

SEQ ID NO: 5562 - RNA, 22 nt, synthetic construct
  source 1..22: mol_type = other RNA
agaagaatcctacagggtcatg

SEQ ID NO: 5563 - RNA, 22 nt, synthetic construct
  source 1..22: mol_type = other RNA
agaagagaggagttatacagct

SEQ ID NO: 5564 - RNA, 22 nt, synthetic construct
  source 1..22: mol_type = other RNA
agaagcaagagagagggaggaa

SEQ ID NO: 5565 - RNA, 22 nt, synthetic construct
  source 1..22: mol_type = other RNA
agaagggaacatgaccctgtag

SEQ ID NO: 5566 - RNA, 22 nt, synthetic construct
  source 1..22: mol_type = other RNA
agaaggtgtatggccccaggta

SEQ ID NO: 5567 - RNA, 22 nt, synthetic construct
  source 1..22: mol_type = other RNA
agaagtccaagttcctccctct

SEQ ID NO: 5568 - RNA, 22 nt, synthetic construct
  source 1..22: mol_type = other RNA
agaatataacaggagatttgaa

SEQ ID NO: 5569 - RNA, 22 nt, synthetic construct
  source 1..22: mol_type = other RNA
agaatcctacagggtcatgttc

SEQ ID NO: 5570 - RNA, 22 nt, synthetic construct
  source 1..22: mol_type = other RNA
agaatttcattgaaaagccttt

SEQ ID NO: 5571 - RNA, 22 nt, synthetic construct
  source 1..22: mol_type = other RNA
agacagaagagaggagttatac

SEQ ID NO: 5572 - RNA, 22 nt, synthetic construct
  source 1..22: mol_type = other RNA
agacagctctaacatgataacc

SEQ ID NO: 5573 - RNA, 22 nt, synthetic construct
  source 1..22: mol_type = other RNA
agacatcccattcctgtatggg

SEQ ID NO: 5574 - RNA, 22 nt, synthetic construct
  source 1..22: mol_type = other RNA
agactacaaacctgtacagcct

SEQ ID NO: 5575 - RNA, 22 nt, synthetic construct
  source 1..22: mol_type = other RNA
agagaaaatgaaccactctttt

SEQ ID NO: 5576 - RNA, 22 nt, synthetic construct
  source 1..22: mol_type = other RNA
agagaagtccaagttcctccct

SEQ ID NO: 5577 - RNA, 22 nt, synthetic construct
  source 1..22: mol_type = other RNA
agagagagggaggaacttggac

SEQ ID NO: 5578 - RNA, 22 nt, synthetic construct
  source 1..22: mol_type = other RNA
agagaggagttatacagctctg

SEQ ID NO: 5579 - RNA, 22 nt, synthetic construct
  source 1..22: mol_type = other RNA
agagagggaggaacttggactt

SEQ ID NO: 5580 - RNA, 22 nt, synthetic construct
  source 1..22: mol_type = other RNA
agagagggcaaaggaactgcca

SEQ ID NO: 5581 - RNA, 22 nt, synthetic construct
  source 1..22: mol_type = other RNA
agagatgtccaatgtggaaatg

SEQ ID NO: 5582 - RNA, 22 nt, synthetic construct
  source 1..22: mol_type = other RNA
agagcatcaggaaggtggatga

SEQ ID NO: 5583 - RNA, 22 nt, synthetic construct
  source 1..22: mol_type = other RNA
agagccaggacctgaactctaa

SEQ ID NO: 5584 - RNA, 22 nt, synthetic construct
  source 1..22: mol_type = other RNA
agagctgtataactcctctctt

SEQ ID NO: 5585 - RNA, 22 nt, synthetic construct
  source 1..22: mol_type = other RNA
agagctgtctataaatagtcct

SEQ ID NO: 5586 - RNA, 22 nt, synthetic construct
  source 1..22: mol_type = other RNA
agaggagataaagggaaacaga

SEQ ID NO: 5587 - RNA, 22 nt, synthetic construct
  source 1..22: mol_type = other RNA
agaggagttatacagctctgca

SEQ ID NO: 5588 - RNA, 22 nt, synthetic construct
  source 1..22: mol_type = other RNA
agaggcaaacacagtccccata

SEQ ID NO: 5589 - RNA, 22 nt, synthetic construct
  source 1..22: mol_type = other RNA
agagggaggaacttggacttct

SEQ ID NO: 5590 - RNA, 22 nt, synthetic construct
  source 1..22: mol_type = other RNA
agagggcaaaggaactgccagt

SEQ ID NO: 5591 - RNA, 22 nt, synthetic construct
  source 1..22: mol_type = other RNA
agagggtcagtaatatggccat

SEQ ID NO: 5592 - RNA, 22 nt, synthetic construct
  source 1..22: mol_type = other RNA
agaggttcccaggccactagag

SEQ ID NO: 5593 - RNA, 22 nt, synthetic construct
  source 1..22: mol_type = other RNA
agagtaacattttagcagggaa

SEQ ID NO: 5594 - RNA, 22 nt, synthetic construct
  source 1..22: mol_type = other RNA
agagtggttcattttctctcct

SEQ ID NO: 5595 - RNA, 22 nt, synthetic construct
  source 1..22: mol_type = other RNA
agagttcaggtcctggctctac

SEQ ID NO: 5596 - RNA, 22 nt, synthetic construct
  source 1..22: mol_type = other RNA
agataaagggaaacagattgtt

SEQ ID NO: 5597 - RNA, 22 nt, synthetic construct
  source 1..22: mol_type = other RNA
agatcaaagccttgcaggtaat

SEQ ID NO: 5598 - RNA, 22 nt, synthetic construct
  source 1..22: mol_type = other RNA
agatcatccaccttcctgatgc

SEQ ID NO: 5599 - RNA, 22 nt, synthetic construct
  source 1..22: mol_type = other RNA
agatgcagagaagtccaagttc

SEQ ID NO: 5600 - RNA, 22 nt, synthetic construct
  source 1..22: mol_type = other RNA
agatgtaactacaaggagctcc

SEQ ID NO: 5601 - RNA, 22 nt, synthetic construct
  source 1..22: mol_type = other RNA
agatgtccaatgtggaaatggc

SEQ ID NO: 5602 - RNA, 22 nt, synthetic construct
  source 1..22: mol_type = other RNA
agatttgaatggggtttcagca

SEQ ID NO: 5603 - RNA, 22 nt, synthetic construct
  source 1..22: mol_type = other RNA
agcaagagagagggaggaactt

SEQ ID NO: 5604 - RNA, 22 nt, synthetic construct
  source 1..22: mol_type = other RNA
agcaataggctataccatgtag

SEQ ID NO: 5605 - RNA, 22 nt, synthetic construct
  source 1..22: mol_type = other RNA
agcagagatgtccaatgtggaa

SEQ ID NO: 5606 - RNA, 22 nt, synthetic construct
  source 1..22: mol_type = other RNA
agcagggaaagaagaatcctac

SEQ ID NO: 5607 - RNA, 22 nt, synthetic construct
  source 1..22: mol_type = other RNA
agcatcaatgtaccctgggcag

SEQ ID NO: 5608 - RNA, 22 nt, synthetic construct
  source 1..22: mol_type = other RNA
agcatcaggaaggtggatgatc

SEQ ID NO: 5609 - RNA, 22 nt, synthetic construct
  source 1..22: mol_type = other RNA
agcatttctcagaacatgtccc

SEQ ID NO: 5610 - RNA, 22 nt, synthetic construct
  source 1..22: mol_type = other RNA
agccaggacctgaactctaata

SEQ ID NO: 5611 - RNA, 22 nt, synthetic construct
  source 1..22: mol_type = other RNA
agcctactacacgcataggcta

SEQ ID NO: 5612 - RNA, 22 nt, synthetic construct
  source 1..22: mol_type = other RNA
agcctatgcgtgtagtaggcta

SEQ ID NO: 5613 - RNA, 22 nt, synthetic construct
  source 1..22: mol_type = other RNA
agcctgttactgtactgaatac

SEQ ID NO: 5614 - RNA, 22 nt, synthetic construct
  source 1..22: mol_type = other RNA
agccttgcaggtaatgtgggta

SEQ ID NO: 5615 - RNA, 22 nt, synthetic construct
  source 1..22: mol_type = other RNA
agcctttggactccaactaaag

SEQ ID NO: 5616 - RNA, 22 nt, synthetic construct
  source 1..22: mol_type = other RNA
agctccagaagcaagagagagg

SEQ ID NO: 5617 - RNA, 22 nt, synthetic construct
  source 1..22: mol_type = other RNA
agctccttgtagttacatctat

SEQ ID NO: 5618 - RNA, 22 nt, synthetic construct
  source 1..22: mol_type = other RNA
agctctaacatgataaccctca

SEQ ID NO: 5619 - RNA, 22 nt, synthetic construct
  source 1..22: mol_type = other RNA
agctctgcagacatcccattcc

SEQ ID NO: 5620 - RNA, 22 nt, synthetic construct
  source 1..22: mol_type = other RNA
agctgtataactcctctcttct

SEQ ID NO: 5621 - RNA, 22 nt, synthetic construct
  source 1..22: mol_type = other RNA
agctgtctataaatagtcctca

SEQ ID NO: 5622 - RNA, 22 nt, synthetic construct
  source 1..22: mol_type = other RNA
aggaaaagagtggttcattttc

SEQ ID NO: 5623 - RNA, 22 nt, synthetic construct
  source 1..22: mol_type = other RNA
aggaactgccagtatggtattg

SEQ ID NO: 5624 - RNA, 22 nt, synthetic construct
  source 1..22: mol_type = other RNA
aggaacttggacttctctgcat

SEQ ID NO: 5625 - RNA, 22 nt, synthetic construct
  source 1..22: mol_type = other RNA
aggaaggtggatgatctgccca

SEQ ID NO: 5626 - RNA, 22 nt, synthetic construct
  source 1..22: mol_type = other RNA
aggaatgggatgtctgcagagc

SEQ ID NO: 5627 - RNA, 22 nt, synthetic construct
  source 1..22: mol_type = other RNA
aggacagtgaaacaaaaacatt

SEQ ID NO: 5628 - RNA, 22 nt, synthetic construct
  source 1..22: mol_type = other RNA
aggacctgaactctaatatagt

SEQ ID NO: 5629 - RNA, 22 nt, synthetic construct
  source 1..22: mol_type = other RNA
aggactatttatagacagctct

SEQ ID NO: 5630 - RNA, 22 nt, synthetic construct
  source 1..22: mol_type = other RNA
aggagaagggaacatgaccctg

SEQ ID NO: 5631 - RNA, 22 nt, synthetic construct
  source 1..22: mol_type = other RNA
aggagagaaaatgaaccactct

SEQ ID NO: 5632 - RNA, 22 nt, synthetic construct
  source 1..22: mol_type = other RNA
aggagataaagggaaacagatt

SEQ ID NO: 5633 - RNA, 22 nt, synthetic construct
  source 1..22: mol_type = other RNA
aggagatttgaatggggtttca

SEQ ID NO: 5634 - RNA, 22 nt, synthetic construct
  source 1..22: mol_type = other RNA
aggagctccagaagcaagagag

SEQ ID NO: 5635 - RNA, 22 nt, synthetic construct
  source 1..22: mol_type = other RNA
aggagttatacagctctgcaga

SEQ ID NO: 5636 - RNA, 22 nt, synthetic construct
  source 1..22: mol_type = other RNA
aggataaaggcaggtggttacc

SEQ ID NO: 5637 - RNA, 22 nt, synthetic construct
  source 1..22: mol_type = other RNA
aggattcttctttccctgctaa

SEQ ID NO: 5638 - RNA, 22 nt, synthetic construct
  source 1..22: mol_type = other RNA
aggcaaacacagtccccataca

SEQ ID NO: 5639 - RNA, 22 nt, synthetic construct
  source 1..22: mol_type = other RNA
aggcaggtggttacccacatta

SEQ ID NO: 5640 - RNA, 22 nt, synthetic construct
  source 1..22: mol_type = other RNA
aggccactagaggagataaagg

SEQ ID NO: 5641 - RNA, 22 nt, synthetic construct
  source 1..22: mol_type = other RNA
aggctacaacacctaggtttgt

SEQ ID NO: 5642 - RNA, 22 nt, synthetic construct
  source 1..22: mol_type = other RNA
aggctataccatgtagcctatg

SEQ ID NO: 5643 - RNA, 22 nt, synthetic construct
  source 1..22: mol_type = other RNA
aggctgtacaggtttgtagtct

SEQ ID NO: 5644 - RNA, 22 nt, synthetic construct
  source 1..22: mol_type = other RNA
aggctttgatctttcttctgcc

SEQ ID NO: 5645 - RNA, 22 nt, synthetic construct
  source 1..22: mol_type = other RNA
aggcttttcaatgaaattctac

SEQ ID NO: 5646 - RNA, 22 nt, synthetic construct
  source 1..22: mol_type = other RNA
agggaaacagattgttataact

SEQ ID NO: 5647 - RNA, 22 nt, synthetic construct
  source 1..22: mol_type = other RNA
agggaaagaagaatcctacagg

SEQ ID NO: 5648 - RNA, 22 nt, synthetic construct
  source 1..22: mol_type = other RNA
agggaacatgaccctgtaggat

SEQ ID NO: 5649 - RNA, 22 nt, synthetic construct
  source 1..22: mol_type = other RNA
agggaattgatttgggagagca

SEQ ID NO: 5650 - RNA, 22 nt, synthetic construct
  source 1..22: mol_type = other RNA
agggaggaacttggacttctct

SEQ ID NO: 5651 - RNA, 22 nt, synthetic construct
  source 1..22: mol_type = other RNA
agggcaaaggaactgccagtat

SEQ ID NO: 5652 - RNA, 22 nt, synthetic construct
  source 1..22: mol_type = other RNA
agggtacattgatgctgaaacc

SEQ ID NO: 5653 - RNA, 22 nt, synthetic construct
  source 1..22: mol_type = other RNA
agggtcagtaatatggccatac

SEQ ID NO: 5654 - RNA, 22 nt, synthetic construct
  source 1..22: mol_type = other RNA
agggtcatgttcccttctcctg

SEQ ID NO: 5655 - RNA, 22 nt, synthetic construct
  source 1..22: mol_type = other RNA
agggttatcatgttagagctgt

SEQ ID NO: 5656 - RNA, 22 nt, synthetic construct
  source 1..22: mol_type = other RNA
aggtaatgtgggtaaccacctg

SEQ ID NO: 5657 - RNA, 22 nt, synthetic construct
  source 1..22: mol_type = other RNA
aggtatggccatattactgacc

SEQ ID NO: 5658 - RNA, 22 nt, synthetic construct
  source 1..22: mol_type = other RNA
aggtcctggctctacaatttac

SEQ ID NO: 5659 - RNA, 22 nt, synthetic construct
  source 1..22: mol_type = other RNA
aggtggatgatctgcccagtca

SEQ ID NO: 5660 - RNA, 22 nt, synthetic construct
  source 1..22: mol_type = other RNA
aggtggttacccacattacctg

SEQ ID NO: 5661 - RNA, 22 nt, synthetic construct
  source 1..22: mol_type = other RNA
aggtgtatggccccaggtatgg

SEQ ID NO: 5662 - RNA, 22 nt, synthetic construct
  source 1..22: mol_type = other RNA
aggtgttgtagcctactacacg

SEQ ID NO: 5663 - RNA, 22 nt, synthetic construct
  source 1..22: mol_type = other RNA
aggttcccaggccactagagga

SEQ ID NO: 5664 - RNA, 22 nt, synthetic construct
  source 1..22: mol_type = other RNA
aggtttgtgtaagcatttctca

SEQ ID NO: 5665 - RNA, 22 nt, synthetic construct
  source 1..22: mol_type = other RNA
agtaaattgtagagccaggacc

SEQ ID NO: 5666 - RNA, 22 nt, synthetic construct
  source 1..22: mol_type = other RNA
agtaacacatgactatattaga

SEQ ID NO: 5667 - RNA, 22 nt, synthetic construct
  source 1..22: mol_type = other RNA
agtaacaggctgtacaggtttg

SEQ ID NO: 5668 - RNA, 22 nt, synthetic construct
  source 1..22: mol_type = other RNA
agtaacattttagcagggaaag

SEQ ID NO: 5669 - RNA, 22 nt, synthetic construct
  source 1..22: mol_type = other RNA
agtaatatggccatacctgggg

SEQ ID NO: 5670 - RNA, 22 nt, synthetic construct
  source 1..22: mol_type = other RNA
agtagaatttcattgaaaagcc

SEQ ID NO: 5671 - RNA, 22 nt, synthetic construct
  source 1..22: mol_type = other RNA
agtaggctacaacacctaggtt

SEQ ID NO: 5672 - RNA, 22 nt, synthetic construct
  source 1..22: mol_type = other RNA
agtatggtattgcaggataaag

SEQ ID NO: 5673 - RNA, 22 nt, synthetic construct
  source 1..22: mol_type = other RNA
agtcacactgttagtaaattgt

SEQ ID NO: 5674 - RNA, 22 nt, synthetic construct
  source 1..22: mol_type = other RNA
agtcatgtgttacttaatgacg

SEQ ID NO: 5675 - RNA, 22 nt, synthetic construct
  source 1..22: mol_type = other RNA
agtccaaaggcttttcaatgaa

SEQ ID NO: 5676 - RNA, 22 nt, synthetic construct
  source 1..22: mol_type = other RNA
agtccaagttcctccctctctc

SEQ ID NO: 5677 - RNA, 22 nt, synthetic construct
  source 1..22: mol_type = other RNA
agtccccatacaggaatgggat

SEQ ID NO: 5678 - RNA, 22 nt, synthetic construct
  source 1..22: mol_type = other RNA
agtcctcaggacagtgaaacaa

SEQ ID NO: 5679 - RNA, 22 nt, synthetic construct
  source 1..22: mol_type = other RNA
agtctaggagcaataggctata

SEQ ID NO: 5680 - RNA, 22 nt, synthetic construct
  source 1..22: mol_type = other RNA
agtgaaacaaaaacattttctc

SEQ ID NO: 5681 - RNA, 22 nt, synthetic construct
  source 1..22: mol_type = other RNA
agtgagggttatcatgttagag

SEQ ID NO: 5682 - RNA, 22 nt, synthetic construct
  source 1..22: mol_type = other RNA
agtggcatgaagaaggtgtatg

SEQ ID NO: 5683 - RNA, 22 nt, synthetic construct
  source 1..22: mol_type = other RNA
agtggcctgggaacctctaaga

SEQ ID NO: 5684 - RNA, 22 nt, synthetic construct
  source 1..22: mol_type = other RNA
agtggttcattttctctcctca

SEQ ID NO: 5685 - RNA, 22 nt, synthetic construct
  source 1..22: mol_type = other RNA
agtgtgactgggcagatcatcc

SEQ ID NO: 5686 - RNA, 22 nt, synthetic construct
  source 1..22: mol_type = other RNA
agttataacaatctgtttccct

SEQ ID NO: 5687 - RNA, 22 nt, synthetic construct
  source 1..22: mol_type = other RNA
agttatacagctctgcagacat

SEQ ID NO: 5688 - RNA, 22 nt, synthetic construct
  source 1..22: mol_type = other RNA
agttcaggtcctggctctacaa

SEQ ID NO: 5689 - RNA, 22 nt, synthetic construct
  source 1..22: mol_type = other RNA
agttcctccctctctcttgctt

SEQ ID NO: 5690 - RNA, 22 nt, synthetic construct
  source 1..22: mol_type = other RNA
agttcctttgccctctctgtag

SEQ ID NO: 5691 - RNA, 22 nt, synthetic construct
  source 1..22: mol_type = other RNA
agttggagtccaaaggcttttc

SEQ ID NO: 5692 - RNA, 22 nt, synthetic construct
  source 1..22: mol_type = other RNA
agtttttgaccttgagaaaatg

SEQ ID NO: 5693 - RNA, 22 nt, synthetic construct
  source 1..22: mol_type = other RNA
ataaaggcaggtggttacccac

SEQ ID NO: 5694 - RNA, 22 nt, synthetic construct
  source 1..22: mol_type = other RNA
ataaagggaaacagattgttat

SEQ ID NO: 5695 - RNA, 22 nt, synthetic construct
  source 1..22: mol_type = other RNA
ataaatagtcctcaggacagtg

SEQ ID NO: 5696 - RNA, 22 nt, synthetic construct
  source 1..22: mol_type = other RNA
ataacaatctgtttccctttat

SEQ ID NO: 5697 - RNA, 22 nt, synthetic construct
  source 1..22: mol_type = other RNA
ataacaggagatttgaatgggg

SEQ ID NO: 5698 - RNA, 22 nt, synthetic construct
  source 1..22: mol_type = other RNA
ataaccctcactatgtggagaa

SEQ ID NO: 5699 - RNA, 22 nt, synthetic construct
  source 1..22: mol_type = other RNA
ataactcctctcttctgtctga

SEQ ID NO: 5700 - RNA, 22 nt, synthetic construct
  source 1..22: mol_type = other RNA
ataatagatgtaactacaagga

SEQ ID NO: 5701 - RNA, 22 nt, synthetic construct
  source 1..22: mol_type = other RNA
atacaaaggaaaagagtggttc

SEQ ID NO: 5702 - RNA, 22 nt, synthetic construct
  source 1..22: mol_type = other RNA
atacaccttcttcatgccactc

SEQ ID NO: 5703 - RNA, 22 nt, synthetic construct
  source 1..22: mol_type = other RNA
atacagctctgcagacatccca

SEQ ID NO: 5704 - RNA, 22 nt, synthetic construct
  source 1..22: mol_type = other RNA
atacaggaatgggatgtctgca

SEQ ID NO: 5705 - RNA, 22 nt, synthetic construct
  source 1..22: mol_type = other RNA
ataccatactggcagttccttt

SEQ ID NO: 5706 - RNA, 22 nt, synthetic construct
  source 1..22: mol_type = other RNA
ataccatgtagcctatgcgtgt

SEQ ID NO: 5707 - RNA, 22 nt, synthetic construct
  source 1..22: mol_type = other RNA
atacctggggccatacaccttc

SEQ ID NO: 5708 - RNA, 22 nt, synthetic construct
  source 1..22: mol_type = other RNA
atactggcagttcctttgccct

SEQ ID NO: 5709 - RNA, 22 nt, synthetic construct
  source 1..22: mol_type = other RNA
atagacagctctaacatgataa

SEQ ID NO: 5710 - RNA, 22 nt, synthetic construct
  source 1..22: mol_type = other RNA
atagatgtaactacaaggagct

SEQ ID NO: 5711 - RNA, 22 nt, synthetic construct
  source 1..22: mol_type = other RNA
ataggctataccatgtagccta

SEQ ID NO: 5712 - RNA, 22 nt, synthetic construct
  source 1..22: mol_type = other RNA
atagtcatgtgttacttaatga

SEQ ID NO: 5713 - RNA, 22 nt, synthetic construct
  source 1..22: mol_type = other RNA
atagtcctcaggacagtgaaac

SEQ ID NO: 5714 - RNA, 22 nt, synthetic construct
  source 1..22: mol_type = other RNA
atagtgagggttatcatgttag

SEQ ID NO: 5715 - RNA, 22 nt, synthetic construct
  source 1..22: mol_type = other RNA
atataacaggagatttgaatgg

SEQ ID NO: 5716 - RNA, 22 nt, synthetic construct
  source 1..22: mol_type = other RNA
atatggccatacctggggccat

SEQ ID NO: 5717 - RNA, 22 nt, synthetic construct
  source 1..22: mol_type = other RNA
atattactgaccctctacagag

SEQ ID NO: 5718 - RNA, 22 nt, synthetic construct
  source 1..22: mol_type = other RNA
atattagagttcaggtcctggc

SEQ ID NO: 5719 - RNA, 22 nt, synthetic construct
  source 1..22: mol_type = other RNA
atattctagaacagggaattga

SEQ ID NO: 5720 - RNA, 22 nt, synthetic construct
  source 1..22: mol_type = other RNA
atcaaagccttgcaggtaatgt

SEQ ID NO: 5721 - RNA, 22 nt, synthetic construct
  source 1..22: mol_type = other RNA
atcaatgtaccctgggcagtag

SEQ ID NO: 5722 - RNA, 22 nt, synthetic construct
  source 1..22: mol_type = other RNA
atcaattccctgttctagaata

SEQ ID NO: 5723 - RNA, 22 nt, synthetic construct
  source 1..22: mol_type = other RNA
atcaggaaggtggatgatctgc

SEQ ID NO: 5724 - RNA, 22 nt, synthetic construct
  source 1..22: mol_type = other RNA
atcatccaccttcctgatgctc

SEQ ID NO: 5725 - RNA, 22 nt, synthetic construct
  source 1..22: mol_type = other RNA
atcatgttagagctgtctataa

SEQ ID NO: 5726 - RNA, 22 nt, synthetic construct
  source 1..22: mol_type = other RNA
atccaccttcctgatgctctcc

SEQ ID NO: 5727 - RNA, 22 nt, synthetic construct
  source 1..22: mol_type = other RNA
atcccattcctgtatggggact

SEQ ID NO: 5728 - RNA, 22 nt, synthetic construct
  source 1..22: mol_type = other RNA
atcctacagggtcatgttccct

SEQ ID NO: 5729 - RNA, 22 nt, synthetic construct
  source 1..22: mol_type = other RNA
atcctgcaataccatactggca

SEQ ID NO: 5730 - RNA, 22 nt, synthetic construct
  source 1..22: mol_type = other RNA
atctcctctagtggcctgggaa

SEQ ID NO: 5731 - RNA, 22 nt, synthetic construct
  source 1..22: mol_type = other RNA
atctcctgttatattctagaac

SEQ ID NO: 5732 - RNA, 22 nt, synthetic construct
  source 1..22: mol_type = other RNA
atctctgctgaggagagaaaat

SEQ ID NO: 5733 - RNA, 22 nt, synthetic construct
  source 1..22: mol_type = other RNA
atctgcccagtcacactgttag

SEQ ID NO: 5734 - RNA, 22 nt, synthetic construct
  source 1..22: mol_type = other RNA
atctgtttccctttatctcctc

SEQ ID NO: 5735 - RNA, 22 nt, synthetic construct
  source 1..22: mol_type = other RNA
atctttagttggagtccaaagg

SEQ ID NO: 5736 - RNA, 22 nt, synthetic construct
  source 1..22: mol_type = other RNA
atctttcttctgccatttccac

SEQ ID NO: 5737 - RNA, 22 nt, synthetic construct
  source 1..22: mol_type = other RNA
atgaaattctactgcccagggt

SEQ ID NO: 5738 - RNA, 22 nt, synthetic construct
  source 1..22: mol_type = other RNA
atgaaccactcttttcctttgt

SEQ ID NO: 5739 - RNA, 22 nt, synthetic construct
  source 1..22: mol_type = other RNA
atgaagaaggtgtatggcccca

SEQ ID NO: 5740 - RNA, 22 nt, synthetic construct
  source 1..22: mol_type = other RNA
atgaccctgtaggattcttctt

SEQ ID NO: 5741 - RNA, 22 nt, synthetic construct
  source 1..22: mol_type = other RNA
atgacggggacatgttctgaga

SEQ ID NO: 5742 - RNA, 22 nt, synthetic construct
  source 1..22: mol_type = other RNA
atgactatattagagttcaggt

SEQ ID NO: 5743 - RNA, 22 nt, synthetic construct
  source 1..22: mol_type = other RNA
atgataaccctcactatgtgga

SEQ ID NO: 5744 - RNA, 22 nt, synthetic construct
  source 1..22: mol_type = other RNA
atgatctgcccagtcacactgt

SEQ ID NO: 5745 - RNA, 22 nt, synthetic construct
  source 1..22: mol_type = other RNA
atgcagagaagtccaagttcct

SEQ ID NO: 5746 - RNA, 22 nt, synthetic construct
  source 1..22: mol_type = other RNA
atgccactccacaggagaaggg

SEQ ID NO: 5747 - RNA, 22 nt, synthetic construct
  source 1..22: mol_type = other RNA
atgcgtgtagtaggctacaaca

SEQ ID NO: 5748 - RNA, 22 nt, synthetic construct
  source 1..22: mol_type = other RNA
atgctctcccaaatcaattccc

SEQ ID NO: 5749 - RNA, 22 nt, synthetic construct
  source 1..22: mol_type = other RNA
atgctgaaaccccattcaaatc

SEQ ID NO: 5750 - RNA, 22 nt, synthetic construct
  source 1..22: mol_type = other RNA
atgcttacacaaacctaggtgt

SEQ ID NO: 5751 - RNA, 22 nt, synthetic construct
  source 1..22: mol_type = other RNA
atggcagaagaaagatcaaagc

SEQ ID NO: 5752 - RNA, 22 nt, synthetic construct
  source 1..22: mol_type = other RNA
atggccatacctggggccatac

SEQ ID NO: 5753 - RNA, 22 nt, synthetic construct
  source 1..22: mol_type = other RNA
atggccatattactgaccctct

SEQ ID NO: 5754 - RNA, 22 nt, synthetic construct
  source 1..22: mol_type = other RNA
atggccccaggtatggccatat

SEQ ID NO: 5755 - RNA, 22 nt, synthetic construct
  source 1..22: mol_type = other RNA
atgggatgtctgcagagctgta

SEQ ID NO: 5756 - RNA, 22 nt, synthetic construct
  source 1..22: mol_type = other RNA
atggggactgtgtttgcctctt

SEQ ID NO: 5757 - RNA, 22 nt, synthetic construct
  source 1..22: mol_type = other RNA
atggggtttcagcatcaatgta

SEQ ID NO: 5758 - RNA, 22 nt, synthetic construct
  source 1..22: mol_type = other RNA
atggtattgcaggataaaggca

SEQ ID NO: 5759 - RNA, 22 nt, synthetic construct
  source 1..22: mol_type = other RNA
atgtaactacaaggagctccag

SEQ ID NO: 5760 - RNA, 22 nt, synthetic construct
  source 1..22: mol_type = other RNA
atgtaccctgggcagtagaatt

SEQ ID NO: 5761 - RNA, 22 nt, synthetic construct
  source 1..22: mol_type = other RNA
atgtagcctatgcgtgtagtag

SEQ ID NO: 5762 - RNA, 22 nt, synthetic construct
  source 1..22: mol_type = other RNA
atgtccaatgtggaaatggcag

SEQ ID NO: 5763 - RNA, 22 nt, synthetic construct
  source 1..22: mol_type = other RNA
atgtccccgtcattaagtaaca

SEQ ID NO: 5764 - RNA, 22 nt, synthetic construct
  source 1..22: mol_type = other RNA
atgtctgcagagctgtataact

SEQ ID NO: 5765 - RNA, 22 nt, synthetic construct
  source 1..22: mol_type = other RNA
atgtggaaatggcagaagaaag

SEQ ID NO: 5766 - RNA, 22 nt, synthetic construct
  source 1..22: mol_type = other RNA
atgtggagaacattgacagagt

SEQ ID NO: 5767 - RNA, 22 nt, synthetic construct
  source 1..22: mol_type = other RNA
atgtgggtaaccacctgccttt

SEQ ID NO: 5768 - RNA, 22 nt, synthetic construct
  source 1..22: mol_type = other RNA
atgtgttacttaatgacgggga

SEQ ID NO: 5769 - RNA, 22 nt, synthetic construct
  source 1..22: mol_type = other RNA
atgttactctgtcaatgttctc

SEQ ID NO: 5770 - RNA, 22 nt, synthetic construct
  source 1..22: mol_type = other RNA
atgttagagctgtctataaata

SEQ ID NO: 5771 - RNA, 22 nt, synthetic construct
  source 1..22: mol_type = other RNA
atgttcccttctcctgtggagt

SEQ ID NO: 5772 - RNA, 22 nt, synthetic construct
  source 1..22: mol_type = other RNA
atgttctccacatagtgagggt

SEQ ID NO: 5773 - RNA, 22 nt, synthetic construct
  source 1..22: mol_type = other RNA
atgttctgagaaatgcttacac

SEQ ID NO: 5774 - RNA, 22 nt, synthetic construct
  source 1..22: mol_type = other RNA
atgttgttttattcttcagaca

SEQ ID NO: 5775 - RNA, 22 nt, synthetic construct
  source 1..22: mol_type = other RNA
atgtttttgtttcactgtcctg

SEQ ID NO: 5776 - RNA, 22 nt, synthetic construct
  source 1..22: mol_type = other RNA
attacctgcaaggctttgatct

SEQ ID NO: 5777 - RNA, 22 nt, synthetic construct
  source 1..22: mol_type = other RNA
attactgaccctctacagagag

SEQ ID NO: 5778 - RNA, 22 nt, synthetic construct
  source 1..22: mol_type = other RNA
attagagttcaggtcctggctc

SEQ ID NO: 5779 - RNA, 22 nt, synthetic construct
  source 1..22: mol_type = other RNA
attatacaaaggaaaagagtgg

SEQ ID NO: 5780 - RNA, 22 nt, synthetic construct
  source 1..22: mol_type = other RNA
attcaaatctcctgttatattc

SEQ ID NO: 5781 - RNA, 22 nt, synthetic construct
  source 1..22: mol_type = other RNA
attccctgttctagaatataac

SEQ ID NO: 5782 - RNA, 22 nt, synthetic construct
  source 1..22: mol_type = other RNA
attcctgtatggggactgtgtt

SEQ ID NO: 5783 - RNA, 22 nt, synthetic construct
  source 1..22: mol_type = other RNA
attctactgcccagggtacatt

SEQ ID NO: 5784 - RNA, 22 nt, synthetic construct
  source 1..22: mol_type = other RNA
attctagaacagggaattgatt

SEQ ID NO: 5785 - RNA, 22 nt, synthetic construct
  source 1..22: mol_type = other RNA
attcttcagacagaagagagga

SEQ ID NO: 5786 - RNA, 22 nt, synthetic construct
  source 1..22: mol_type = other RNA
attcttctttccctgctaaaat

SEQ ID NO: 5787 - RNA, 22 nt, synthetic construct
  source 1..22: mol_type = other RNA
attgaaaagcctttggactcca

SEQ ID NO: 5788 - RNA, 22 nt, synthetic construct
  source 1..22: mol_type = other RNA
attgacagagtaacattttagc

SEQ ID NO: 5789 - RNA, 22 nt, synthetic construct
  source 1..22: mol_type = other RNA
attgatgctgaaaccccattca

SEQ ID NO: 5790 - RNA, 22 nt, synthetic construct
  source 1..22: mol_type = other RNA
attgatttgggagagcatcagg

SEQ ID NO: 5791 - RNA, 22 nt, synthetic construct
  source 1..22: mol_type = other RNA
attgcaggataaaggcaggtgg

SEQ ID NO: 5792 - RNA, 22 nt, synthetic construct
  source 1..22: mol_type = other RNA
attgctcctagactacaaacct

SEQ ID NO: 5793 - RNA, 22 nt, synthetic construct
  source 1..22: mol_type = other RNA
attggacatctctgctgaggag

SEQ ID NO: 5794 - RNA, 22 nt, synthetic construct
  source 1..22: mol_type = other RNA
attgtagagccaggacctgaac

SEQ ID NO: 5795 - RNA, 22 nt, synthetic construct
  source 1..22: mol_type = other RNA
atttactaacagtgtgactggg

SEQ ID NO: 5796 - RNA, 22 nt, synthetic construct
  source 1..22: mol_type = other RNA
atttatagacagctctaacatg

SEQ ID NO: 5797 - RNA, 22 nt, synthetic construct
  source 1..22: mol_type = other RNA
atttcattgaaaagcctttgga

SEQ ID NO: 5798 - RNA, 22 nt, synthetic construct
  source 1..22: mol_type = other RNA
atttccacattggacatctctg

SEQ ID NO: 5799 - RNA, 22 nt, synthetic construct
  source 1..22: mol_type = other RNA
atttctcagaacatgtccccgt

SEQ ID NO: 5800 - RNA, 22 nt, synthetic construct
  source 1..22: mol_type = other RNA
atttgaatggggtttcagcatc

SEQ ID NO: 5801 - RNA, 22 nt, synthetic construct
  source 1..22: mol_type = other RNA
atttgggagagcatcaggaagg

SEQ ID NO: 5802 - RNA, 22 nt, synthetic construct
  source 1..22: mol_type = other RNA
attttagcagggaaagaagaat

SEQ ID NO: 5803 - RNA, 22 nt, synthetic construct
  source 1..22: mol_type = other RNA
attttctctcctcagcagagat

SEQ ID NO: 5804 - RNA, 22 nt, synthetic construct
  source 1..22: mol_type = other RNA
caaaaacattttctcaaggtca

SEQ ID NO: 5805 - RNA, 22 nt, synthetic construct
  source 1..22: mol_type = other RNA
caaacacagtccccatacagga

SEQ ID NO: 5806 - RNA, 22 nt, synthetic construct
  source 1..22: mol_type = other RNA
caaacctaggtgttgtagccta

SEQ ID NO: 5807 - RNA, 22 nt, synthetic construct
  source 1..22: mol_type = other RNA
caaagccttgcaggtaatgtgg

SEQ ID NO: 5808 - RNA, 22 nt, synthetic construct
  source 1..22: mol_type = other RNA
caaaggaaaagagtggttcatt

SEQ ID NO: 5809 - RNA, 22 nt, synthetic construct
  source 1..22: mol_type = other RNA
caaaggaactgccagtatggta

SEQ ID NO: 5810 - RNA, 22 nt, synthetic construct
  source 1..22: mol_type = other RNA
caaaggcttttcaatgaaattc

SEQ ID NO: 5811 - RNA, 22 nt, synthetic construct
  source 1..22: mol_type = other RNA
caaatcaattccctgttctaga

SEQ ID NO: 5812 - RNA, 22 nt, synthetic construct
  source 1..22: mol_type = other RNA
caaatctcctgttatattctag

SEQ ID NO: 5813 - RNA, 22 nt, synthetic construct
  source 1..22: mol_type = other RNA
caacacctaggtttgtgtaagc

SEQ ID NO: 5814 - RNA, 22 nt, synthetic construct
  source 1..22: mol_type = other RNA
caacattatacaaaggaaaaga

SEQ ID NO: 5815 - RNA, 22 nt, synthetic construct
  source 1..22: mol_type = other RNA
caactaaagatgcagagaagtc

SEQ ID NO: 5816 - RNA, 22 nt, synthetic construct
  source 1..22: mol_type = other RNA
caagagagagggaggaacttgg

SEQ ID NO: 5817 - RNA, 22 nt, synthetic construct
  source 1..22: mol_type = other RNA
caaggagctccagaagcaagag

SEQ ID NO: 5818 - RNA, 22 nt, synthetic construct
  source 1..22: mol_type = other RNA
caaggctttgatctttcttctg

SEQ ID NO: 5819 - RNA, 22 nt, synthetic construct
  source 1..22: mol_type = other RNA
caagttataacaatctgtttcc

SEQ ID NO: 5820 - RNA, 22 nt, synthetic construct
  source 1..22: mol_type = other RNA
caagttcctccctctctcttgc

SEQ ID NO: 5821 - RNA, 22 nt, synthetic construct
  source 1..22: mol_type = other RNA
caataccatactggcagttcct

SEQ ID NO: 5822 - RNA, 22 nt, synthetic construct
  source 1..22: mol_type = other RNA
caataggctataccatgtagcc

SEQ ID NO: 5823 - RNA, 22 nt, synthetic construct
  source 1..22: mol_type = other RNA
caatctgtttccctttatctcc

SEQ ID NO: 5824 - RNA, 22 nt, synthetic construct
  source 1..22: mol_type = other RNA
caatgaaattctactgcccagg

SEQ ID NO: 5825 - RNA, 22 nt, synthetic construct
  source 1..22: mol_type = other RNA
caatgtaccctgggcagtagaa

SEQ ID NO: 5826 - RNA, 22 nt, synthetic construct
  source 1..22: mol_type = other RNA
caatgtggaaatggcagaagaa

SEQ ID NO: 5827 - RNA, 22 nt, synthetic construct
  source 1..22: mol_type = other RNA
caatgttctccacatagtgagg

SEQ ID NO: 5828 - RNA, 22 nt, synthetic construct
  source 1..22: mol_type = other RNA
caattccctgttctagaatata

SEQ ID NO: 5829 - RNA, 22 nt, synthetic construct
  source 1..22: mol_type = other RNA
caatttactaacagtgtgactg

SEQ ID NO: 5830 - RNA, 22 nt, synthetic construct
  source 1..22: mol_type = other RNA
cacaaacctaggtgttgtagcc

SEQ ID NO: 5831 - RNA, 22 nt, synthetic construct
  source 1..22: mol_type = other RNA
cacactgttagtaaattgtaga

SEQ ID NO: 5832 - RNA, 22 nt, synthetic construct
  source 1..22: mol_type = other RNA
cacaggagaagggaacatgacc

SEQ ID NO: 5833 - RNA, 22 nt, synthetic construct
  source 1..22: mol_type = other RNA
cacagtattcagtacagtaaca

SEQ ID NO: 5834 - RNA, 22 nt, synthetic construct
  source 1..22: mol_type = other RNA
cacagtccccatacaggaatgg

SEQ ID NO: 5835 - RNA, 22 nt, synthetic construct
  source 1..22: mol_type = other RNA
cacatagtgagggttatcatgt

SEQ ID NO: 5836 - RNA, 22 nt, synthetic construct
  source 1..22: mol_type = other RNA
cacatgactatattagagttca

SEQ ID NO: 5837 - RNA, 22 nt, synthetic construct
  source 1..22: mol_type = other RNA
cacattacctgcaaggctttga

SEQ ID NO: 5838 - RNA, 22 nt, synthetic construct
  source 1..22: mol_type = other RNA
cacattggacatctctgctgag

SEQ ID NO: 5839 - RNA, 22 nt, synthetic construct
  source 1..22: mol_type = other RNA
cacctaggtttgtgtaagcatt

SEQ ID NO: 5840 - RNA, 22 nt, synthetic construct
  source 1..22: mol_type = other RNA
cacctgcctttatcctgcaata

SEQ ID NO: 5841 - RNA, 22 nt, synthetic construct
  source 1..22: mol_type = other RNA
caccttcctgatgctctcccaa

SEQ ID NO: 5842 - RNA, 22 nt, synthetic construct
  source 1..22: mol_type = other RNA
caccttcttcatgccactccac

SEQ ID NO: 5843 - RNA, 22 nt, synthetic construct
  source 1..22: mol_type = other RNA
cacgcataggctacatggtata

SEQ ID NO: 5844 - RNA, 22 nt, synthetic construct
  source 1..22: mol_type = other RNA
cactagaggagataaagggaaa

SEQ ID NO: 5845 - RNA, 22 nt, synthetic construct
  source 1..22: mol_type = other RNA
cactatgtggagaacattgaca

SEQ ID NO: 5846 - RNA, 22 nt, synthetic construct
  source 1..22: mol_type = other RNA
cactccacaggagaagggaaca

SEQ ID NO: 5847 - RNA, 22 nt, synthetic construct
  source 1..22: mol_type = other RNA
cactcttttcctttgtataatg

SEQ ID NO: 5848 - RNA, 22 nt, synthetic construct
  source 1..22: mol_type = other RNA
cactgtcctgaggactatttat

SEQ ID NO: 5849 - RNA, 22 nt, synthetic construct
  source 1..22: mol_type = other RNA
cactgttagtaaattgtagagc

SEQ ID NO: 5850 - RNA, 22 nt, synthetic construct
  source 1..22: mol_type = other RNA
cagaacatgtccccgtcattaa

SEQ ID NO: 5851 - RNA, 22 nt, synthetic construct
  source 1..22: mol_type = other RNA
cagaagaaagatcaaagccttg

SEQ ID NO: 5852 - RNA, 22 nt, synthetic construct
  source 1..22: mol_type = other RNA
cagaagagaggagttatacagc

SEQ ID NO: 5853 - RNA, 22 nt, synthetic construct
  source 1..22: mol_type = other RNA
cagaagcaagagagagggagga

SEQ ID NO: 5854 - RNA, 22 nt, synthetic construct
  source 1..22: mol_type = other RNA
cagacagaagagaggagttata

SEQ ID NO: 5855 - RNA, 22 nt, synthetic construct
  source 1..22: mol_type = other RNA
cagacatcccattcctgtatgg

SEQ ID NO: 5856 - RNA, 22 nt, synthetic construct
  source 1..22: mol_type = other RNA
cagagaagtccaagttcctccc

SEQ ID NO: 5857 - RNA, 22 nt, synthetic construct
  source 1..22: mol_type = other RNA
cagagagggcaaaggaactgcc

SEQ ID NO: 5858 - RNA, 22 nt, synthetic construct
  source 1..22: mol_type = other RNA
cagagatgtccaatgtggaaat

SEQ ID NO: 5859 - RNA, 22 nt, synthetic construct
  source 1..22: mol_type = other RNA
cagagctgtataactcctctct

SEQ ID NO: 5860 - RNA, 22 nt, synthetic construct
  source 1..22: mol_type = other RNA
cagagtaacattttagcaggga

SEQ ID NO: 5861 - RNA, 22 nt, synthetic construct
  source 1..22: mol_type = other RNA
cagatcatccaccttcctgatg

SEQ ID NO: 5862 - RNA, 22 nt, synthetic construct
  source 1..22: mol_type = other RNA
cagcagagatgtccaatgtgga

SEQ ID NO: 5863 - RNA, 22 nt, synthetic construct
  source 1..22: mol_type = other RNA
cagcatcaatgtaccctgggca

SEQ ID NO: 5864 - RNA, 22 nt, synthetic construct
  source 1..22: mol_type = other RNA
cagcctgttactgtactgaata

SEQ ID NO: 5865 - RNA, 22 nt, synthetic construct
  source 1..22: mol_type = other RNA
cagctctaacatgataaccctc

SEQ ID NO: 5866 - RNA, 22 nt, synthetic construct
  source 1..22: mol_type = other RNA
cagctctgcagacatcccattc

SEQ ID NO: 5867 - RNA, 22 nt, synthetic construct
  source 1..22: mol_type = other RNA
caggaaggtggatgatctgccc

SEQ ID NO: 5868 - RNA, 22 nt, synthetic construct
  source 1..22: mol_type = other RNA
caggaatgggatgtctgcagag

SEQ ID NO: 5869 - RNA, 22 nt, synthetic construct
  source 1..22: mol_type = other RNA
caggacagtgaaacaaaaacat

SEQ ID NO: 5870 - RNA, 22 nt, synthetic construct
  source 1..22: mol_type = other RNA
caggacctgaactctaatatag

SEQ ID NO: 5871 - RNA, 22 nt, synthetic construct
  source 1..22: mol_type = other RNA
caggagaagggaacatgaccct

SEQ ID NO: 5872 - RNA, 22 nt, synthetic construct
  source 1..22: mol_type = other RNA
caggagatttgaatggggtttc

SEQ ID NO: 5873 - RNA, 22 nt, synthetic construct
  source 1..22: mol_type = other RNA
caggataaaggcaggtggttac

SEQ ID NO: 5874 - RNA, 22 nt, synthetic construct
  source 1..22: mol_type = other RNA
caggccactagaggagataaag

SEQ ID NO: 5875 - RNA, 22 nt, synthetic construct
  source 1..22: mol_type = other RNA
caggctgtacaggtttgtagtc

SEQ ID NO: 5876 - RNA, 22 nt, synthetic construct
  source 1..22: mol_type = other RNA
cagggaaagaagaatcctacag

SEQ ID NO: 5877 - RNA, 22 nt, synthetic construct
  source 1..22: mol_type = other RNA
cagggaattgatttgggagagc

SEQ ID NO: 5878 - RNA, 22 nt, synthetic construct
  source 1..22: mol_type = other RNA
cagggtacattgatgctgaaac

SEQ ID NO: 5879 - RNA, 22 nt, synthetic construct
  source 1..22: mol_type = other RNA
cagggtcatgttcccttctcct

SEQ ID NO: 5880 - RNA, 22 nt, synthetic construct
  source 1..22: mol_type = other RNA
caggtaatgtgggtaaccacct

SEQ ID NO: 5881 - RNA, 22 nt, synthetic construct
  source 1..22: mol_type = other RNA
caggtatggccatattactgac

SEQ ID NO: 5882 - RNA, 22 nt, synthetic construct
  source 1..22: mol_type = other RNA
caggtcctggctctacaattta

SEQ ID NO: 5883 - RNA, 22 nt, synthetic construct
  source 1..22: mol_type = other RNA
caggtggttacccacattacct

SEQ ID NO: 5884 - RNA, 22 nt, synthetic construct
  source 1..22: mol_type = other RNA
cagtaacaggctgtacaggttt

SEQ ID NO: 5885 - RNA, 22 nt, synthetic construct
  source 1..22: mol_type = other RNA
cagtaatatggccatacctggg

SEQ ID NO: 5886 - RNA, 22 nt, synthetic construct
  source 1..22: mol_type = other RNA
cagtagaatttcattgaaaagc

SEQ ID NO: 5887 - RNA, 22 nt, synthetic construct
  source 1..22: mol_type = other RNA
cagtatggtattgcaggataaa

SEQ ID NO: 5888 - RNA, 22 nt, synthetic construct
  source 1..22: mol_type = other RNA
cagtcacactgttagtaaattg

SEQ ID NO: 5889 - RNA, 22 nt, synthetic construct
  source 1..22: mol_type = other RNA
cagtccccatacaggaatggga

SEQ ID NO: 5890 - RNA, 22 nt, synthetic construct
  source 1..22: mol_type = other RNA
cagtgaaacaaaaacattttct

SEQ ID NO: 5891 - RNA, 22 nt, synthetic construct
  source 1..22: mol_type = other RNA
cagtgtgactgggcagatcatc

SEQ ID NO: 5892 - RNA, 22 nt, synthetic construct
  source 1..22: mol_type = other RNA
cagttcctttgccctctctgta

SEQ ID NO: 5893 - RNA, 22 nt, synthetic construct
  source 1..22: mol_type = other RNA
catacaccttcttcatgccact

SEQ ID NO: 5894 - RNA, 22 nt, synthetic construct
  source 1..22: mol_type = other RNA
catacaggaatgggatgtctgc

SEQ ID NO: 5895 - RNA, 22 nt, synthetic construct
  source 1..22: mol_type = other RNA
catacctggggccatacacctt

SEQ ID NO: 5896 - RNA, 22 nt, synthetic construct
  source 1..22: mol_type = other RNA
catactggcagttcctttgccc

SEQ ID NO: 5897 - RNA, 22 nt, synthetic construct
  source 1..22: mol_type = other RNA
catagtgagggttatcatgtta

SEQ ID NO: 5898 - RNA, 22 nt, synthetic construct
  source 1..22: mol_type = other RNA
catattactgaccctctacaga

SEQ ID NO: 5899 - RNA, 22 nt, synthetic construct
  source 1..22: mol_type = other RNA
catcaatgtaccctgggcagta

SEQ ID NO: 5900 - RNA, 22 nt, synthetic construct
  source 1..22: mol_type = other RNA
catcaggaaggtggatgatctg

SEQ ID NO: 5901 - RNA, 22 nt, synthetic construct
  source 1..22: mol_type = other RNA
catccaccttcctgatgctctc

SEQ ID NO: 5902 - RNA, 22 nt, synthetic construct
  source 1..22: mol_type = other RNA
catcccattcctgtatggggac

SEQ ID NO: 5903 - RNA, 22 nt, synthetic construct
  source 1..22: mol_type = other RNA
catctctgctgaggagagaaaa

SEQ ID NO: 5904 - RNA, 22 nt, synthetic construct
  source 1..22: mol_type = other RNA
catctttagttggagtccaaag

SEQ ID NO: 5905 - RNA, 22 nt, synthetic construct
  source 1..22: mol_type = other RNA
catgaagaaggtgtatggcccc

SEQ ID NO: 5906 - RNA, 22 nt, synthetic construct
  source 1..22: mol_type = other RNA
catgaccctgtaggattcttct

SEQ ID NO: 5907 - RNA, 22 nt, synthetic construct
  source 1..22: mol_type = other RNA
catgactatattagagttcagg

SEQ ID NO: 5908 - RNA, 22 nt, synthetic construct
  source 1..22: mol_type = other RNA
catgataaccctcactatgtgg

SEQ ID NO: 5909 - RNA, 22 nt, synthetic construct
  source 1..22: mol_type = other RNA
catgccactccacaggagaagg

SEQ ID NO: 5910 - RNA, 22 nt, synthetic construct
  source 1..22: mol_type = other RNA
catggtatagcctattgctcct

SEQ ID NO: 5911 - RNA, 22 nt, synthetic construct
  source 1..22: mol_type = other RNA
catgtagcctatgcgtgtagta

SEQ ID NO: 5912 - RNA, 22 nt, synthetic construct
  source 1..22: mol_type = other RNA
catgtccccgtcattaagtaac

SEQ ID NO: 5913 - RNA, 22 nt, synthetic construct
  source 1..22: mol_type = other RNA
catgtgttacttaatgacgggg

SEQ ID NO: 5914 - RNA, 22 nt, synthetic construct
  source 1..22: mol_type = other RNA
catgttagagctgtctataaat

SEQ ID NO: 5915 - RNA, 22 nt, synthetic construct
  source 1..22: mol_type = other RNA
catgttcccttctcctgtggag

SEQ ID NO: 5916 - RNA, 22 nt, synthetic construct
  source 1..22: mol_type = other RNA
catgttctgagaaatgcttaca

SEQ ID NO: 5917 - RNA, 22 nt, synthetic construct
  source 1..22: mol_type = other RNA
cattaagtaacacatgactata

SEQ ID NO: 5918 - RNA, 22 nt, synthetic construct
  source 1..22: mol_type = other RNA
cattacctgcaaggctttgatc

SEQ ID NO: 5919 - RNA, 22 nt, synthetic construct
  source 1..22: mol_type = other RNA
cattatacaaaggaaaagagtg

SEQ ID NO: 5920 - RNA, 22 nt, synthetic construct
  source 1..22: mol_type = other RNA
cattcaaatctcctgttatatt

SEQ ID NO: 5921 - RNA, 22 nt, synthetic construct
  source 1..22: mol_type = other RNA
cattcctgtatggggactgtgt

SEQ ID NO: 5922 - RNA, 22 nt, synthetic construct
  source 1..22: mol_type = other RNA
cattgaaaagcctttggactcc

SEQ ID NO: 5923 - RNA, 22 nt, synthetic construct
  source 1..22: mol_type = other RNA
cattgacagagtaacattttag

SEQ ID NO: 5924 - RNA, 22 nt, synthetic construct
  source 1..22: mol_type = other RNA
cattgatgctgaaaccccattc

SEQ ID NO: 5925 - RNA, 22 nt, synthetic construct
  source 1..22: mol_type = other RNA
cattggacatctctgctgagga

SEQ ID NO: 5926 - RNA, 22 nt, synthetic construct
  source 1..22: mol_type = other RNA
catttccacattggacatctct

SEQ ID NO: 5927 - RNA, 22 nt, synthetic construct
  source 1..22: mol_type = other RNA
catttctcagaacatgtccccg

SEQ ID NO: 5928 - RNA, 22 nt, synthetic construct
  source 1..22: mol_type = other RNA
cattttagcagggaaagaagaa

SEQ ID NO: 5929 - RNA, 22 nt, synthetic construct
  source 1..22: mol_type = other RNA
cattttctctcctcagcagaga

SEQ ID NO: 5930 - RNA, 22 nt, synthetic construct
  source 1..22: mol_type = other RNA
ccaaaggcttttcaatgaaatt

SEQ ID NO: 5931 - RNA, 22 nt, synthetic construct
  source 1..22: mol_type = other RNA
ccaaatcaattccctgttctag

SEQ ID NO: 5932 - RNA, 22 nt, synthetic construct
  source 1..22: mol_type = other RNA
ccaactaaagatgcagagaagt

SEQ ID NO: 5933 - RNA, 22 nt, synthetic construct
  source 1..22: mol_type = other RNA
ccaagttcctccctctctcttg

SEQ ID NO: 5934 - RNA, 22 nt, synthetic construct
  source 1..22: mol_type = other RNA
ccaatgtggaaatggcagaaga

SEQ ID NO: 5935 - RNA, 22 nt, synthetic construct
  source 1..22: mol_type = other RNA
ccacaggagaagggaacatgac

SEQ ID NO: 5936 - RNA, 22 nt, synthetic construct
  source 1..22: mol_type = other RNA
ccacagtattcagtacagtaac

SEQ ID NO: 5937 - RNA, 22 nt, synthetic construct
  source 1..22: mol_type = other RNA
ccacatagtgagggttatcatg

SEQ ID NO: 5938 - RNA, 22 nt, synthetic construct
  source 1..22: mol_type = other RNA
ccacattacctgcaaggctttg

SEQ ID NO: 5939 - RNA, 22 nt, synthetic construct
  source 1..22: mol_type = other RNA
ccacattggacatctctgctga

SEQ ID NO: 5940 - RNA, 22 nt, synthetic construct
  source 1..22: mol_type = other RNA
ccacctgcctttatcctgcaat

SEQ ID NO: 5941 - RNA, 22 nt, synthetic construct
  source 1..22: mol_type = other RNA
ccaccttcctgatgctctccca

SEQ ID NO: 5942 - RNA, 22 nt, synthetic construct
  source 1..22: mol_type = other RNA
ccactagaggagataaagggaa

SEQ ID NO: 5943 - RNA, 22 nt, synthetic construct
  source 1..22: mol_type = other RNA
ccactccacaggagaagggaac

SEQ ID NO: 5944 - RNA, 22 nt, synthetic construct
  source 1..22: mol_type = other RNA
ccactcttttcctttgtataat

SEQ ID NO: 5945 - RNA, 22 nt, synthetic construct
  source 1..22: mol_type = other RNA
ccagaagcaagagagagggagg

SEQ ID NO: 5946 - RNA, 22 nt, synthetic construct
  source 1..22: mol_type = other RNA
ccaggacctgaactctaatata

SEQ ID NO: 5947 - RNA, 22 nt, synthetic construct
  source 1..22: mol_type = other RNA
ccaggccactagaggagataaa

SEQ ID NO: 5948 - RNA, 22 nt, synthetic construct
  source 1..22: mol_type = other RNA
ccagggtacattgatgctgaaa

SEQ ID NO: 5949 - RNA, 22 nt, synthetic construct
  source 1..22: mol_type = other RNA
ccaggtatggccatattactga

SEQ ID NO: 5950 - RNA, 22 nt, synthetic construct
  source 1..22: mol_type = other RNA
ccagtatggtattgcaggataa

SEQ ID NO: 5951 - RNA, 22 nt, synthetic construct
  source 1..22: mol_type = other RNA
ccagtcacactgttagtaaatt

SEQ ID NO: 5952 - RNA, 22 nt, synthetic construct
  source 1..22: mol_type = other RNA
ccatacaccttcttcatgccac

SEQ ID NO: 5953 - RNA, 22 nt, synthetic construct
  source 1..22: mol_type = other RNA
ccatacaggaatgggatgtctg

SEQ ID NO: 5954 - RNA, 22 nt, synthetic construct
  source 1..22: mol_type = other RNA
ccatacctggggccatacacct

SEQ ID NO: 5955 - RNA, 22 nt, synthetic construct
  source 1..22: mol_type = other RNA
ccatactggcagttcctttgcc

SEQ ID NO: 5956 - RNA, 22 nt, synthetic construct
  source 1..22: mol_type = other RNA
ccatattactgaccctctacag

SEQ ID NO: 5957 - RNA, 22 nt, synthetic construct
  source 1..22: mol_type = other RNA
ccatgtagcctatgcgtgtagt

SEQ ID NO: 5958 - RNA, 22 nt, synthetic construct
  source 1..22: mol_type = other RNA
ccattcaaatctcctgttatat

SEQ ID NO: 5959 - RNA, 22 nt, synthetic construct
  source 1..22: mol_type = other RNA
ccattcctgtatggggactgtg

SEQ ID NO: 5960 - RNA, 22 nt, synthetic construct
  source 1..22: mol_type = other RNA
ccatttccacattggacatctc

SEQ ID NO: 5961 - RNA, 22 nt, synthetic construct
  source 1..22: mol_type = other RNA
cccaaatcaattccctgttcta

SEQ ID NO: 5962 - RNA, 22 nt, synthetic construct
  source 1..22: mol_type = other RNA
cccacagtattcagtacagtaa

SEQ ID NO: 5963 - RNA, 22 nt, synthetic construct
  source 1..22: mol_type = other RNA
cccacattacctgcaaggcttt

SEQ ID NO: 5964 - RNA, 22 nt, synthetic construct
  source 1..22: mol_type = other RNA
cccaggccactagaggagataa

SEQ ID NO: 5965 - RNA, 22 nt, synthetic construct
  source 1..22: mol_type = other RNA
cccagggtacattgatgctgaa

SEQ ID NO: 5966 - RNA, 22 nt, synthetic construct
  source 1..22: mol_type = other RNA
cccaggtatggccatattactg

SEQ ID NO: 5967 - RNA, 22 nt, synthetic construct
  source 1..22: mol_type = other RNA
cccagtcacactgttagtaaat

SEQ ID NO: 5968 - RNA, 22 nt, synthetic construct
  source 1..22: mol_type = other RNA
cccatacaggaatgggatgtct

SEQ ID NO: 5969 - RNA, 22 nt, synthetic construct
  source 1..22: mol_type = other RNA
cccattcaaatctcctgttata

SEQ ID NO: 5970 - RNA, 22 nt, synthetic construct
  source 1..22: mol_type = other RNA
cccattcctgtatggggactgt

SEQ ID NO: 5971 - RNA, 22 nt, synthetic construct
  source 1..22: mol_type = other RNA
ccccaggtatggccatattact

SEQ ID NO: 5972 - RNA, 22 nt, synthetic construct
  source 1..22: mol_type = other RNA
ccccatacaggaatgggatgtc

SEQ ID NO: 5973 - RNA, 22 nt, synthetic construct
  source 1..22: mol_type = other RNA
ccccattcaaatctcctgttat

SEQ ID NO: 5974 - RNA, 22 nt, synthetic construct
  source 1..22: mol_type = other RNA
ccccgtcattaagtaacacatg

SEQ ID NO: 5975 - RNA, 22 nt, synthetic construct
  source 1..22: mol_type = other RNA
cccgtcattaagtaacacatga

SEQ ID NO: 5976 - RNA, 22 nt, synthetic construct
  source 1..22: mol_type = other RNA
ccctcactatgtggagaacatt

SEQ ID NO: 5977 - RNA, 22 nt, synthetic construct
  source 1..22: mol_type = other RNA
ccctctacagagagggcaaagg

SEQ ID NO: 5978 - RNA, 22 nt, synthetic construct
  source 1..22: mol_type = other RNA
ccctctctcttgcttctggagc

SEQ ID NO: 5979 - RNA, 22 nt, synthetic construct
  source 1..22: mol_type = other RNA
ccctctctgtagagggtcagta

SEQ ID NO: 5980 - RNA, 22 nt, synthetic construct
  source 1..22: mol_type = other RNA
ccctgctaaaatgttactctgt

SEQ ID NO: 5981 - RNA, 22 nt, synthetic construct
  source 1..22: mol_type = other RNA
ccctgggcagtagaatttcatt

SEQ ID NO: 5982 - RNA, 22 nt, synthetic construct
  source 1..22: mol_type = other RNA
ccctgtaggattcttctttccc

SEQ ID NO: 5983 - RNA, 22 nt, synthetic construct
  source 1..22: mol_type = other RNA
ccctgttctagaatataacagg

SEQ ID NO: 5984 - RNA, 22 nt, synthetic construct
  source 1..22: mol_type = other RNA
cccttctcctgtggagtggcat

SEQ ID NO: 5985 - RNA, 22 nt, synthetic construct
  source 1..22: mol_type = other RNA
ccctttatctcctctagtggcc

SEQ ID NO: 5986 - RNA, 22 nt, synthetic construct
  source 1..22: mol_type = other RNA
ccgtcattaagtaacacatgac

SEQ ID NO: 5987 - RNA, 22 nt, synthetic construct
  source 1..22: mol_type = other RNA
cctacagggtcatgttcccttc

SEQ ID NO: 5988 - RNA, 22 nt, synthetic construct
  source 1..22: mol_type = other RNA
cctactacacgcataggctaca

SEQ ID NO: 5989 - RNA, 22 nt, synthetic construct
  source 1..22: mol_type = other RNA
cctagactacaaacctgtacag

SEQ ID NO: 5990 - RNA, 22 nt, synthetic construct
  source 1..22: mol_type = other RNA
cctaggtgttgtagcctactac

SEQ ID NO: 5991 - RNA, 22 nt, synthetic construct
  source 1..22: mol_type = other RNA
cctaggtttgtgtaagcatttc

SEQ ID NO: 5992 - RNA, 22 nt, synthetic construct
  source 1..22: mol_type = other RNA
cctatgcgtgtagtaggctaca

SEQ ID NO: 5993 - RNA, 22 nt, synthetic construct
  source 1..22: mol_type = other RNA
cctcactatgtggagaacattg

SEQ ID NO: 5994 - RNA, 22 nt, synthetic construct
  source 1..22: mol_type = other RNA
cctcagcagagatgtccaatgt

SEQ ID NO: 5995 - RNA, 22 nt, synthetic construct
  source 1..22: mol_type = other RNA
cctcaggacagtgaaacaaaaa

SEQ ID NO: 5996 - RNA, 22 nt, synthetic construct
  source 1..22: mol_type = other RNA
cctccctctctcttgcttctgg

SEQ ID NO: 5997 - RNA, 22 nt, synthetic construct
  source 1..22: mol_type = other RNA
cctctaagaggcaaacacagtc

SEQ ID NO: 5998 - RNA, 22 nt, synthetic construct
  source 1..22: mol_type = other RNA
cctctacagagagggcaaagga

SEQ ID NO: 5999 - RNA, 22 nt, synthetic construct
  source 1..22: mol_type = other RNA
cctctagtggcctgggaacctc

SEQ ID NO: 6000 - RNA, 22 nt, synthetic construct
  source 1..22: mol_type = other RNA
cctctctcttgcttctggagct

SEQ ID NO: 6001 - RNA, 22 nt, synthetic construct
  source 1..22: mol_type = other RNA
cctctctgtagagggtcagtaa

SEQ ID NO: 6002 - RNA, 22 nt, synthetic construct
  source 1..22: mol_type = other RNA
cctctcttctgtctgaagaata

SEQ ID NO: 6003 - RNA, 22 nt, synthetic construct
  source 1..22: mol_type = other RNA
cctcttagaggttcccaggcca

SEQ ID NO: 6004 - RNA, 22 nt, synthetic construct
  source 1..22: mol_type = other RNA
cctgaactctaatatagtcatg

SEQ ID NO: 6005 - RNA, 22 nt, synthetic construct
  source 1..22: mol_type = other RNA
cctgaggactatttatagacag

SEQ ID NO: 6006 - RNA, 22 nt, synthetic construct
  source 1..22: mol_type = other RNA
cctgatgctctcccaaatcaat

SEQ ID NO: 6007 - RNA, 22 nt, synthetic construct
  source 1..22: mol_type = other RNA
cctgcaaggctttgatctttct

SEQ ID NO: 6008 - RNA, 22 nt, synthetic construct
  source 1..22: mol_type = other RNA
cctgcaataccatactggcagt

SEQ ID NO: 6009 - RNA, 22 nt, synthetic construct
  source 1..22: mol_type = other RNA
cctgcctttatcctgcaatacc

SEQ ID NO: 6010 - RNA, 22 nt, synthetic construct
  source 1..22: mol_type = other RNA
cctgctaaaatgttactctgtc

SEQ ID NO: 6011 - RNA, 22 nt, synthetic construct
  source 1..22: mol_type = other RNA
cctggctctacaatttactaac

SEQ ID NO: 6012 - RNA, 22 nt, synthetic construct
  source 1..22: mol_type = other RNA
cctgggaacctctaagaggcaa

SEQ ID NO: 6013 - RNA, 22 nt, synthetic construct
  source 1..22: mol_type = other RNA
cctgggcagtagaatttcattg

SEQ ID NO: 6014 - RNA, 22 nt, synthetic construct
  source 1..22: mol_type = other RNA
cctggggccatacaccttcttc

SEQ ID NO: 6015 - RNA, 22 nt, synthetic construct
  source 1..22: mol_type = other RNA
cctgtaggattcttctttccct

SEQ ID NO: 6016 - RNA, 22 nt, synthetic construct
  source 1..22: mol_type = other RNA
cctgtatggggactgtgtttgc

SEQ ID NO: 6017 - RNA, 22 nt, synthetic construct
  source 1..22: mol_type = other RNA
cctgtggagtggcatgaagaag

SEQ ID NO: 6018 - RNA, 22 nt, synthetic construct
  source 1..22: mol_type = other RNA
cctgttactgtactgaatactg

SEQ ID NO: 6019 - RNA, 22 nt, synthetic construct
  source 1..22: mol_type = other RNA
cctgttatattctagaacaggg

SEQ ID NO: 6020 - RNA, 22 nt, synthetic construct
  source 1..22: mol_type = other RNA
cctgttctagaatataacagga

SEQ ID NO: 6021 - RNA, 22 nt, synthetic construct
  source 1..22: mol_type = other RNA
ccttcctgatgctctcccaaat

SEQ ID NO: 6022 - RNA, 22 nt, synthetic construct
  source 1..22: mol_type = other RNA
ccttctcctgtggagtggcatg

SEQ ID NO: 6023 - RNA, 22 nt, synthetic construct
  source 1..22: mol_type = other RNA
ccttcttcatgccactccacag

SEQ ID NO: 6024 - RNA, 22 nt, synthetic construct
  source 1..22: mol_type = other RNA
ccttgagaaaatgtttttgttt

SEQ ID NO: 6025 - RNA, 22 nt, synthetic construct
  source 1..22: mol_type = other RNA
ccttgcaggtaatgtgggtaac

SEQ ID NO: 6026 - RNA, 22 nt, synthetic construct
  source 1..22: mol_type = other RNA
ccttgtagttacatctattata

SEQ ID NO: 6027 - RNA, 22 nt, synthetic construct
  source 1..22: mol_type = other RNA
cctttatcctgcaataccatac

SEQ ID NO: 6028 - RNA, 22 nt, synthetic construct
  source 1..22: mol_type = other RNA
cctttatctcctctagtggcct

SEQ ID NO: 6029 - RNA, 22 nt, synthetic construct
  source 1..22: mol_type = other RNA
cctttgccctctctgtagaggg

SEQ ID NO: 6030 - RNA, 22 nt, synthetic construct
  source 1..22: mol_type = other RNA
cctttggactccaactaaagat

SEQ ID NO: 6031 - RNA, 22 nt, synthetic construct
  source 1..22: mol_type = other RNA
cgcataggctacatggtatagc

SEQ ID NO: 6032 - RNA, 22 nt, synthetic construct
  source 1..22: mol_type = other RNA
cggggacatgttctgagaaatg

SEQ ID NO: 6033 - RNA, 22 nt, synthetic construct
  source 1..22: mol_type = other RNA
cgtcattaagtaacacatgact

SEQ ID NO: 6034 - RNA, 22 nt, synthetic construct
  source 1..22: mol_type = other RNA
cgtgtagtaggctacaacacct

SEQ ID NO: 6035 - RNA, 22 nt, synthetic construct
  source 1..22: mol_type = other RNA
ctaaaatgttactctgtcaatg

SEQ ID NO: 6036 - RNA, 22 nt, synthetic construct
  source 1..22: mol_type = other RNA
ctaaagatgcagagaagtccaa

SEQ ID NO: 6037 - RNA, 22 nt, synthetic construct
  source 1..22: mol_type = other RNA
ctaacagtgtgactgggcagat

SEQ ID NO: 6038 - RNA, 22 nt, synthetic construct
  source 1..22: mol_type = other RNA
ctaacatgataaccctcactat

SEQ ID NO: 6039 - RNA, 22 nt, synthetic construct
  source 1..22: mol_type = other RNA
ctaagaggcaaacacagtcccc

SEQ ID NO: 6040 - RNA, 22 nt, synthetic construct
  source 1..22: mol_type = other RNA
ctaatatagtcatgtgttactt

SEQ ID NO: 6041 - RNA, 22 nt, synthetic construct
  source 1..22: mol_type = other RNA
ctacaacacctaggtttgtgta

SEQ ID NO: 6042 - RNA, 22 nt, synthetic construct
  source 1..22: mol_type = other RNA
ctacaaggagctccagaagcaa

SEQ ID NO: 6043 - RNA, 22 nt, synthetic construct
  source 1..22: mol_type = other RNA
ctacaatttactaacagtgtga

SEQ ID NO: 6044 - RNA, 22 nt, synthetic construct
  source 1..22: mol_type = other RNA
ctacacgcataggctacatggt

SEQ ID NO: 6045 - RNA, 22 nt, synthetic construct
  source 1..22: mol_type = other RNA
ctacagagagggcaaaggaact

SEQ ID NO: 6046 - RNA, 22 nt, synthetic construct
  source 1..22: mol_type = other RNA
ctacagggtcatgttcccttct

SEQ ID NO: 6047 - RNA, 22 nt, synthetic construct
  source 1..22: mol_type = other RNA
ctacatggtatagcctattgct

SEQ ID NO: 6048 - RNA, 22 nt, synthetic construct
  source 1..22: mol_type = other RNA
ctactacacgcataggctacat

SEQ ID NO: 6049 - RNA, 22 nt, synthetic construct
  source 1..22: mol_type = other RNA
ctactgcccagggtacattgat

SEQ ID NO: 6050 - RNA, 22 nt, synthetic construct
  source 1..22: mol_type = other RNA
ctagaacagggaattgatttgg

SEQ ID NO: 6051 - RNA, 22 nt, synthetic construct
  source 1..22: mol_type = other RNA
ctagaatataacaggagatttg

SEQ ID NO: 6052 - RNA, 22 nt, synthetic construct
  source 1..22: mol_type = other RNA
ctagactacaaacctgtacagc

SEQ ID NO: 6053 - RNA, 22 nt, synthetic construct
  source 1..22: mol_type = other RNA
ctagaggagataaagggaaaca

SEQ ID NO: 6054 - RNA, 22 nt, synthetic construct
  source 1..22: mol_type = other RNA
ctaggtgttgtagcctactaca

SEQ ID NO: 6055 - RNA, 22 nt, synthetic construct
  source 1..22: mol_type = other RNA
ctaggtttgtgtaagcatttct

SEQ ID NO: 6056 - RNA, 22 nt, synthetic construct
  source 1..22: mol_type = other RNA
ctagtggcctgggaacctctaa

SEQ ID NO: 6057 - RNA, 22 nt, synthetic construct
  source 1..22: mol_type = other RNA
ctataaatagtcctcaggacag

SEQ ID NO: 6058 - RNA, 22 nt, synthetic construct
  source 1..22: mol_type = other RNA
ctataatagatgtaactacaag

SEQ ID NO: 6059 - RNA, 22 nt, synthetic construct
  source 1..22: mol_type = other RNA
ctataccatgtagcctatgcgt

SEQ ID NO: 6060 - RNA, 22 nt, synthetic construct
  source 1..22: mol_type = other RNA
ctatattagagttcaggtcctg

SEQ ID NO: 6061 - RNA, 22 nt, synthetic construct
  source 1..22: mol_type = other RNA
ctatgcgtgtagtaggctacaa

SEQ ID NO: 6062 - RNA, 22 nt, synthetic construct
  source 1..22: mol_type = other RNA
ctatgtggagaacattgacaga

SEQ ID NO: 6063 - RNA, 22 nt, synthetic construct
  source 1..22: mol_type = other RNA
ctatttatagacagctctaaca

SEQ ID NO: 6064 - RNA, 22 nt, synthetic construct
  source 1..22: mol_type = other RNA
ctcactatgtggagaacattga

SEQ ID NO: 6065 - RNA, 22 nt, synthetic construct
  source 1..22: mol_type = other RNA
ctcagaacatgtccccgtcatt

SEQ ID NO: 6066 - RNA, 22 nt, synthetic construct
  source 1..22: mol_type = other RNA
ctcagcagagatgtccaatgtg

SEQ ID NO: 6067 - RNA, 22 nt, synthetic construct
  source 1..22: mol_type = other RNA
ctcaggacagtgaaacaaaaac

SEQ ID NO: 6068 - RNA, 22 nt, synthetic construct
  source 1..22: mol_type = other RNA
ctccaactaaagatgcagagaa

SEQ ID NO: 6069 - RNA, 22 nt, synthetic construct
  source 1..22: mol_type = other RNA
ctccacaggagaagggaacatg

SEQ ID NO: 6070 - RNA, 22 nt, synthetic construct
  source 1..22: mol_type = other RNA
ctccacatagtgagggttatca

SEQ ID NO: 6071 - RNA, 22 nt, synthetic construct
  source 1..22: mol_type = other RNA
ctccagaagcaagagagaggga

SEQ ID NO: 6072 - RNA, 22 nt, synthetic construct
  source 1..22: mol_type = other RNA
ctcccaaatcaattccctgttc

SEQ ID NO: 6073 - RNA, 22 nt, synthetic construct
  source 1..22: mol_type = other RNA
ctccctctctcttgcttctgga

SEQ ID NO: 6074 - RNA, 22 nt, synthetic construct
  source 1..22: mol_type = other RNA
ctcctagactacaaacctgtac

SEQ ID NO: 6075 - RNA, 22 nt, synthetic construct
  source 1..22: mol_type = other RNA
ctcctcagcagagatgtccaat

SEQ ID NO: 6076 - RNA, 22 nt, synthetic construct
  source 1..22: mol_type = other RNA
ctcctctagtggcctgggaacc

SEQ ID NO: 6077 - RNA, 22 nt, synthetic construct
  source 1..22: mol_type = other RNA
ctcctctcttctgtctgaagaa

SEQ ID NO: 6078 - RNA, 22 nt, synthetic construct
  source 1..22: mol_type = other RNA
ctcctgtggagtggcatgaaga

SEQ ID NO: 6079 - RNA, 22 nt, synthetic construct
  source 1..22: mol_type = other RNA
ctcctgttatattctagaacag

SEQ ID NO: 6080 - RNA, 22 nt, synthetic construct
  source 1..22: mol_type = other RNA
ctccttgtagttacatctatta

SEQ ID NO: 6081 - RNA, 22 nt, synthetic construct
  source 1..22: mol_type = other RNA
ctctaacatgataaccctcact

SEQ ID NO: 6082 - RNA, 22 nt, synthetic construct
  source 1..22: mol_type = other RNA
ctctaagaggcaaacacagtcc

SEQ ID NO: 6083 - RNA, 22 nt, synthetic construct
  source 1..22: mol_type = other RNA
ctctaatatagtcatgtgttac

SEQ ID NO: 6084 - RNA, 22 nt, synthetic construct
  source 1..22: mol_type = other RNA
ctctacaatttactaacagtgt

SEQ ID NO: 6085 - RNA, 22 nt, synthetic construct
  source 1..22: mol_type = other RNA
ctctacagagagggcaaaggaa

SEQ ID NO: 6086 - RNA, 22 nt, synthetic construct
  source 1..22: mol_type = other RNA
ctctagtggcctgggaacctct

SEQ ID NO: 6087 - RNA, 22 nt, synthetic construct
  source 1..22: mol_type = other RNA
ctctcccaaatcaattccctgt

SEQ ID NO: 6088 - RNA, 22 nt, synthetic construct
  source 1..22: mol_type = other RNA
ctctcctcagcagagatgtcca

SEQ ID NO: 6089 - RNA, 22 nt, synthetic construct
  source 1..22: mol_type = other RNA
ctctctcttgcttctggagctc

SEQ ID NO: 6090 - RNA, 22 nt, synthetic construct
  source 1..22: mol_type = other RNA
ctctctgtagagggtcagtaat

SEQ ID NO: 6091 - RNA, 22 nt, synthetic construct
  source 1..22: mol_type = other RNA
ctctcttctgtctgaagaataa

SEQ ID NO: 6092 - RNA, 22 nt, synthetic construct
  source 1..22: mol_type = other RNA
ctctcttgcttctggagctcct

SEQ ID NO: 6093 - RNA, 22 nt, synthetic construct
  source 1..22: mol_type = other RNA
ctctgcagacatcccattcctg

SEQ ID NO: 6094 - RNA, 22 nt, synthetic construct
  source 1..22: mol_type = other RNA
ctctgcatctttagttggagtc

SEQ ID NO: 6095 - RNA, 22 nt, synthetic construct
  source 1..22: mol_type = other RNA
ctctgctgaggagagaaaatga

SEQ ID NO: 6096 - RNA, 22 nt, synthetic construct
  source 1..22: mol_type = other RNA
ctctgtagagggtcagtaatat

SEQ ID NO: 6097 - RNA, 22 nt, synthetic construct
  source 1..22: mol_type = other RNA
ctctgtcaatgttctccacata

SEQ ID NO: 6098 - RNA, 22 nt, synthetic construct
  source 1..22: mol_type = other RNA
ctcttagaggttcccaggccac

SEQ ID NO: 6099 - RNA, 22 nt, synthetic construct
  source 1..22: mol_type = other RNA
ctcttctgtctgaagaataaaa

SEQ ID NO: 6100 - RNA, 22 nt, synthetic construct
  source 1..22: mol_type = other RNA
ctcttgcttctggagctccttg

SEQ ID NO: 6101 - RNA, 22 nt, synthetic construct
  source 1..22: mol_type = other RNA
ctcttttcctttgtataatgtt

SEQ ID NO: 6102 - RNA, 22 nt, synthetic construct
  source 1..22: mol_type = other RNA
ctgaaaccccattcaaatctcc

SEQ ID NO: 6103 - RNA, 22 nt, synthetic construct
  source 1..22: mol_type = other RNA
ctgaactctaatatagtcatgt

SEQ ID NO: 6104 - RNA, 22 nt, synthetic construct
  source 1..22: mol_type = other RNA
ctgaccctctacagagagggca

SEQ ID NO: 6105 - RNA, 22 nt, synthetic construct
  source 1..22: mol_type = other RNA
ctgagaaatgcttacacaaacc

SEQ ID NO: 6106 - RNA, 22 nt, synthetic construct
  source 1..22: mol_type = other RNA
ctgaggactatttatagacagc

SEQ ID NO: 6107 - RNA, 22 nt, synthetic construct
  source 1..22: mol_type = other RNA
ctgaggagagaaaatgaaccac

SEQ ID NO: 6108 - RNA, 22 nt, synthetic construct
  source 1..22: mol_type = other RNA
ctgatgctctcccaaatcaatt

SEQ ID NO: 6109 - RNA, 22 nt, synthetic construct
  source 1..22: mol_type = other RNA
ctgcaaggctttgatctttctt

SEQ ID NO: 6110 - RNA, 22 nt, synthetic construct
  source 1..22: mol_type = other RNA
ctgcaataccatactggcagtt

SEQ ID NO: 6111 - RNA, 22 nt, synthetic construct
  source 1..22: mol_type = other RNA
ctgcagacatcccattcctgta

SEQ ID NO: 6112 - RNA, 22 nt, synthetic construct
  source 1..22: mol_type = other RNA
ctgcagagctgtataactcctc

SEQ ID NO: 6113 - RNA, 22 nt, synthetic construct
  source 1..22: mol_type = other RNA
ctgcatctttagttggagtcca

SEQ ID NO: 6114 - RNA, 22 nt, synthetic construct
  source 1..22: mol_type = other RNA
ctgccagtatggtattgcagga

SEQ ID NO: 6115 - RNA, 22 nt, synthetic construct
  source 1..22: mol_type = other RNA
ctgccatttccacattggacat

SEQ ID NO: 6116 - RNA, 22 nt, synthetic construct
  source 1..22: mol_type = other RNA
ctgcccacagtattcagtacag

SEQ ID NO: 6117 - RNA, 22 nt, synthetic construct
  source 1..22: mol_type = other RNA
ctgcccagggtacattgatgct

SEQ ID NO: 6118 - RNA, 22 nt, synthetic construct
  source 1..22: mol_type = other RNA
ctgcccagtcacactgttagta

SEQ ID NO: 6119 - RNA, 22 nt, synthetic construct
  source 1..22: mol_type = other RNA
ctgcctttatcctgcaatacca

SEQ ID NO: 6120 - RNA, 22 nt, synthetic construct
  source 1..22: mol_type = other RNA
ctgctaaaatgttactctgtca

SEQ ID NO: 6121 - RNA, 22 nt, synthetic construct
  source 1..22: mol_type = other RNA
ctgctgaggagagaaaatgaac

SEQ ID NO: 6122 - RNA, 22 nt, synthetic construct
  source 1..22: mol_type = other RNA
ctggagctccttgtagttacat

SEQ ID NO: 6123 - RNA, 22 nt, synthetic construct
  source 1..22: mol_type = other RNA
ctggcagttcctttgccctctc

SEQ ID NO: 6124 - RNA, 22 nt, synthetic construct
  source 1..22: mol_type = other RNA
ctggctctacaatttactaaca

SEQ ID NO: 6125 - RNA, 22 nt, synthetic construct
  source 1..22: mol_type = other RNA
ctgggaacctctaagaggcaaa

SEQ ID NO: 6126 - RNA, 22 nt, synthetic construct
  source 1..22: mol_type = other RNA
ctgggcagatcatccaccttcc

SEQ ID NO: 6127 - RNA, 22 nt, synthetic construct
  source 1..22: mol_type = other RNA
ctgggcagtagaatttcattga

SEQ ID NO: 6128 - RNA, 22 nt, synthetic construct
  source 1..22: mol_type = other RNA
ctggggccatacaccttcttca

SEQ ID NO: 6129 - RNA, 22 nt, synthetic construct
  source 1..22: mol_type = other RNA
ctgtagagggtcagtaatatgg

SEQ ID NO: 6130 - RNA, 22 nt, synthetic construct
  source 1..22: mol_type = other RNA
ctgtaggattcttctttccctg

SEQ ID NO: 6131 - RNA, 22 nt, synthetic construct
  source 1..22: mol_type = other RNA
ctgtataactcctctcttctgt

SEQ ID NO: 6132 - RNA, 22 nt, synthetic construct
  source 1..22: mol_type = other RNA
ctgtatggggactgtgtttgcc

SEQ ID NO: 6133 - RNA, 22 nt, synthetic construct
  source 1..22: mol_type = other RNA
ctgtcaatgttctccacatagt

SEQ ID NO: 6134 - RNA, 22 nt, synthetic construct
  source 1..22: mol_type = other RNA
ctgtcctgaggactatttatag

SEQ ID NO: 6135 - RNA, 22 nt, synthetic construct
  source 1..22: mol_type = other RNA
ctgtctataaatagtcctcagg

SEQ ID NO: 6136 - RNA, 22 nt, synthetic construct
  source 1..22: mol_type = other RNA
ctgtctgaagaataaaacaaca

SEQ ID NO: 6137 - RNA, 22 nt, synthetic construct
  source 1..22: mol_type = other RNA
ctgtggagtggcatgaagaagg

SEQ ID NO: 6138 - RNA, 22 nt, synthetic construct
  source 1..22: mol_type = other RNA
ctgtgtttgcctcttagaggtt

SEQ ID NO: 6139 - RNA, 22 nt, synthetic construct
  source 1..22: mol_type = other RNA
ctgttactgtactgaatactgt

SEQ ID NO: 6140 - RNA, 22 nt, synthetic construct
  source 1..22: mol_type = other RNA
ctgttagtaaattgtagagcca

SEQ ID NO: 6141 - RNA, 22 nt, synthetic construct
  source 1..22: mol_type = other RNA
ctgttatattctagaacaggga

SEQ ID NO: 6142 - RNA, 22 nt, synthetic construct
  source 1..22: mol_type = other RNA
ctgttctagaatataacaggag

SEQ ID NO: 6143 - RNA, 22 nt, synthetic construct
  source 1..22: mol_type = other RNA
ctgtttccctttatctcctcta

SEQ ID NO: 6144 - RNA, 22 nt, synthetic construct
  source 1..22: mol_type = other RNA
cttaatgacggggacatgttct

SEQ ID NO: 6145 - RNA, 22 nt, synthetic construct
  source 1..22: mol_type = other RNA
cttacacaaacctaggtgttgt

SEQ ID NO: 6146 - RNA, 22 nt, synthetic construct
  source 1..22: mol_type = other RNA
cttagaggttcccaggccacta

SEQ ID NO: 6147 - RNA, 22 nt, synthetic construct
  source 1..22: mol_type = other RNA
cttcagacagaagagaggagtt

SEQ ID NO: 6148 - RNA, 22 nt, synthetic construct
  source 1..22: mol_type = other RNA
cttcatgccactccacaggaga

SEQ ID NO: 6149 - RNA, 22 nt, synthetic construct
  source 1..22: mol_type = other RNA
cttcctgatgctctcccaaatc

SEQ ID NO: 6150 - RNA, 22 nt, synthetic construct
  source 1..22: mol_type = other RNA
cttctcctgtggagtggcatga

SEQ ID NO: 6151 - RNA, 22 nt, synthetic construct
  source 1..22: mol_type = other RNA
cttctctgcatctttagttgga

SEQ ID NO: 6152 - RNA, 22 nt, synthetic construct
  source 1..22: mol_type = other RNA
cttctgccatttccacattgga

SEQ ID NO: 6153 - RNA, 22 nt, synthetic construct
  source 1..22: mol_type = other RNA
cttctggagctccttgtagtta

SEQ ID NO: 6154 - RNA, 22 nt, synthetic construct
  source 1..22: mol_type = other RNA
cttctgtctgaagaataaaaca

SEQ ID NO: 6155 - RNA, 22 nt, synthetic construct
  source 1..22: mol_type = other RNA
cttcttcatgccactccacagg

SEQ ID NO: 6156 - RNA, 22 nt, synthetic construct
  source 1..22: mol_type = other RNA
cttctttccctgctaaaatgtt

SEQ ID NO: 6157 - RNA, 22 nt, synthetic construct
  source 1..22: mol_type = other RNA
cttgagaaaatgtttttgtttc

SEQ ID NO: 6158 - RNA, 22 nt, synthetic construct
  source 1..22: mol_type = other RNA
cttgcaggtaatgtgggtaacc

SEQ ID NO: 6159 - RNA, 22 nt, synthetic construct
  source 1..22: mol_type = other RNA
cttgcttctggagctccttgta

SEQ ID NO: 6160 - RNA, 22 nt, synthetic construct
  source 1..22: mol_type = other RNA
cttggacttctctgcatcttta

SEQ ID NO: 6161 - RNA, 22 nt, synthetic construct
  source 1..22: mol_type = other RNA
cttgtagttacatctattatag

SEQ ID NO: 6162 - RNA, 22 nt, synthetic construct
  source 1..22: mol_type = other RNA
ctttagttggagtccaaaggct

SEQ ID NO: 6163 - RNA, 22 nt, synthetic construct
  source 1..22: mol_type = other RNA
ctttatcctgcaataccatact

SEQ ID NO: 6164 - RNA, 22 nt, synthetic construct
  source 1..22: mol_type = other RNA
ctttatctcctctagtggcctg

SEQ ID NO: 6165 - RNA, 22 nt, synthetic construct
  source 1..22: mol_type = other RNA
ctttccctgctaaaatgttact

SEQ ID NO: 6166 - RNA, 22 nt, synthetic construct
  source 1..22: mol_type = other RNA
ctttcttctgccatttccacat

SEQ ID NO: 6167 - RNA, 22 nt, synthetic construct
  source 1..22: mol_type = other RNA
ctttgatctttcttctgccatt

SEQ ID NO: 6168 - RNA, 22 nt, synthetic construct
  source 1..22: mol_type = other RNA
ctttgccctctctgtagagggt

SEQ ID NO: 6169 - RNA, 22 nt, synthetic construct
  source 1..22: mol_type = other RNA
ctttggactccaactaaagatg

SEQ ID NO: 6170 - RNA, 22 nt, synthetic construct
  source 1..22: mol_type = other RNA
cttttcaatgaaattctactgc

SEQ ID NO: 6171 - RNA, 22 nt, synthetic construct
  source 1..22: mol_type = other RNA
cttttcctttgtataatgttgt

SEQ ID NO: 6172 - RNA, 22 nt, synthetic construct
  source 1..22: mol_type = other RNA
gaaaagagtggttcattttctc

SEQ ID NO: 6173 - RNA, 22 nt, synthetic construct
  source 1..22: mol_type = other RNA
gaaaagcctttggactccaact

SEQ ID NO: 6174 - RNA, 22 nt, synthetic construct
  source 1..22: mol_type = other RNA
gaaaatgaaccactcttttcct

SEQ ID NO: 6175 - RNA, 22 nt, synthetic construct
  source 1..22: mol_type = other RNA
gaaaatgtttttgtttcactgt

SEQ ID NO: 6176 - RNA, 22 nt, synthetic construct
  source 1..22: mol_type = other RNA
gaaacaaaaacattttctcaag

SEQ ID NO: 6177 - RNA, 22 nt, synthetic construct
  source 1..22: mol_type = other RNA
gaaacagattgttataacttga

SEQ ID NO: 6178 - RNA, 22 nt, synthetic construct
  source 1..22: mol_type = other RNA
gaaaccccattcaaatctcctg

SEQ ID NO: 6179 - RNA, 22 nt, synthetic construct
  source 1..22: mol_type = other RNA
gaaagaagaatcctacagggtc

SEQ ID NO: 6180 - RNA, 22 nt, synthetic construct
  source 1..22: mol_type = other RNA
gaaagatcaaagccttgcaggt

SEQ ID NO: 6181 - RNA, 22 nt, synthetic construct
  source 1..22: mol_type = other RNA
gaaatgcttacacaaacctagg

SEQ ID NO: 6182 - RNA, 22 nt, synthetic construct
  source 1..22: mol_type = other RNA
gaaatggcagaagaaagatcaa

SEQ ID NO: 6183 - RNA, 22 nt, synthetic construct
  source 1..22: mol_type = other RNA
gaaattctactgcccagggtac

SEQ ID NO: 6184 - RNA, 22 nt, synthetic construct
  source 1..22: mol_type = other RNA
gaacagggaattgatttgggag

SEQ ID NO: 6185 - RNA, 22 nt, synthetic construct
  source 1..22: mol_type = other RNA
gaacatgaccctgtaggattct

SEQ ID NO: 6186 - RNA, 22 nt, synthetic construct
  source 1..22: mol_type = other RNA
gaacatgtccccgtcattaagt

SEQ ID NO: 6187 - RNA, 22 nt, synthetic construct
  source 1..22: mol_type = other RNA
gaacattgacagagtaacattt

SEQ ID NO: 6188 - RNA, 22 nt, synthetic construct
  source 1..22: mol_type = other RNA
gaaccactcttttcctttgtat

SEQ ID NO: 6189 - RNA, 22 nt, synthetic construct
  source 1..22: mol_type = other RNA
gaacctctaagaggcaaacaca

SEQ ID NO: 6190 - RNA, 22 nt, synthetic construct
  source 1..22: mol_type = other RNA
gaactctaatatagtcatgtgt

SEQ ID NO: 6191 - RNA, 22 nt, synthetic construct
  source 1..22: mol_type = other RNA
gaactgccagtatggtattgca

SEQ ID NO: 6192 - RNA, 22 nt, synthetic construct
  source 1..22: mol_type = other RNA
gaacttggacttctctgcatct

SEQ ID NO: 6193 - RNA, 22 nt, synthetic construct
  source 1..22: mol_type = other RNA
gaagaaagatcaaagccttgca

SEQ ID NO: 6194 - RNA, 22 nt, synthetic construct
  source 1..22: mol_type = other RNA
gaagaaggtgtatggccccagg

SEQ ID NO: 6195 - RNA, 22 nt, synthetic construct
  source 1..22: mol_type = other RNA
gaagaatcctacagggtcatgt

SEQ ID NO: 6196 - RNA, 22 nt, synthetic construct
  source 1..22: mol_type = other RNA
gaagagaggagttatacagctc

SEQ ID NO: 6197 - RNA, 22 nt, synthetic construct
  source 1..22: mol_type = other RNA
gaagcaagagagagggaggaac

SEQ ID NO: 6198 - RNA, 22 nt, synthetic construct
  source 1..22: mol_type = other RNA
gaagggaacatgaccctgtagg

SEQ ID NO: 6199 - RNA, 22 nt, synthetic construct
  source 1..22: mol_type = other RNA
gaaggtggatgatctgcccagt

SEQ ID NO: 6200 - RNA, 22 nt, synthetic construct
  source 1..22: mol_type = other RNA
gaaggtgtatggccccaggtat

SEQ ID NO: 6201 - RNA, 22 nt, synthetic construct
  source 1..22: mol_type = other RNA
gaagtccaagttcctccctctc

SEQ ID NO: 6202 - RNA, 22 nt, synthetic construct
  source 1..22: mol_type = other RNA
gaatataacaggagatttgaat

SEQ ID NO: 6203 - RNA, 22 nt, synthetic construct
  source 1..22: mol_type = other RNA
gaatcctacagggtcatgttcc

SEQ ID NO: 6204 - RNA, 22 nt, synthetic construct
  source 1..22: mol_type = other RNA
gaatgggatgtctgcagagctg

SEQ ID NO: 6205 - RNA, 22 nt, synthetic construct
  source 1..22: mol_type = other RNA
gaatggggtttcagcatcaatg

SEQ ID NO: 6206 - RNA, 22 nt, synthetic construct
  source 1..22: mol_type = other RNA
gaattgatttgggagagcatca

SEQ ID NO: 6207 - RNA, 22 nt, synthetic construct
  source 1..22: mol_type = other RNA
gaatttcattgaaaagcctttg

SEQ ID NO: 6208 - RNA, 22 nt, synthetic construct
  source 1..22: mol_type = other RNA
gacagaagagaggagttataca

SEQ ID NO: 6209 - RNA, 22 nt, synthetic construct
  source 1..22: mol_type = other RNA
gacagagtaacattttagcagg

SEQ ID NO: 6210 - RNA, 22 nt, synthetic construct
  source 1..22: mol_type = other RNA
gacagctctaacatgataaccc

SEQ ID NO: 6211 - RNA, 22 nt, synthetic construct
  source 1..22: mol_type = other RNA
gacagtgaaacaaaaacatttt

SEQ ID NO: 6212 - RNA, 22 nt, synthetic construct
  source 1..22: mol_type = other RNA
gacatcccattcctgtatgggg

SEQ ID NO: 6213 - RNA, 22 nt, synthetic construct
  source 1..22: mol_type = other RNA
gacatctctgctgaggagagaa

SEQ ID NO: 6214 - RNA, 22 nt, synthetic construct
  source 1..22: mol_type = other RNA
gacatgttctgagaaatgctta

SEQ ID NO: 6215 - RNA, 22 nt, synthetic construct
  source 1..22: mol_type = other RNA
gaccctctacagagagggcaaa

SEQ ID NO: 6216 - RNA, 22 nt, synthetic construct
  source 1..22: mol_type = other RNA
gaccctgtaggattcttctttc

SEQ ID NO: 6217 - RNA, 22 nt, synthetic construct
  source 1..22: mol_type = other RNA
gacctgaactctaatatagtca

SEQ ID NO: 6218 - RNA, 22 nt, synthetic construct
  source 1..22: mol_type = other RNA
gaccttgagaaaatgtttttgt

SEQ ID NO: 6219 - RNA, 22 nt, synthetic construct
  source 1..22: mol_type = other RNA
gacggggacatgttctgagaaa

SEQ ID NO: 6220 - RNA, 22 nt, synthetic construct
  source 1..22: mol_type = other RNA
gactacaaacctgtacagcctg

SEQ ID NO: 6221 - RNA, 22 nt, synthetic construct
  source 1..22: mol_type = other RNA
gactatattagagttcaggtcc

SEQ ID NO: 6222 - RNA, 22 nt, synthetic construct
  source 1..22: mol_type = other RNA
gactatttatagacagctctaa

SEQ ID NO: 6223 - RNA, 22 nt, synthetic construct
  source 1..22: mol_type = other RNA
gactccaactaaagatgcagag

SEQ ID NO: 6224 - RNA, 22 nt, synthetic construct
  source 1..22: mol_type = other RNA
gactgggcagatcatccacctt

SEQ ID NO: 6225 - RNA, 22 nt, synthetic construct
  source 1..22: mol_type = other RNA
gactgtgtttgcctcttagagg

SEQ ID NO: 6226 - RNA, 22 nt, synthetic construct
  source 1..22: mol_type = other RNA
gacttctctgcatctttagttg

SEQ ID NO: 6227 - RNA, 22 nt, synthetic construct
  source 1..22: mol_type = other RNA
gagaaaatgaaccactcttttc

SEQ ID NO: 6228 - RNA, 22 nt, synthetic construct
  source 1..22: mol_type = other RNA
gagaaaatgtttttgtttcact

SEQ ID NO: 6229 - RNA, 22 nt, synthetic construct
  source 1..22: mol_type = other RNA
gagaaatgcttacacaaaccta

SEQ ID NO: 6230 - RNA, 22 nt, synthetic construct
  source 1..22: mol_type = other RNA
gagaacattgacagagtaacat

SEQ ID NO: 6231 - RNA, 22 nt, synthetic construct
  source 1..22: mol_type = other RNA
gagaagggaacatgaccctgta

SEQ ID NO: 6232 - RNA, 22 nt, synthetic construct
  source 1..22: mol_type = other RNA
gagaagtccaagttcctccctc

SEQ ID NO: 6233 - RNA, 22 nt, synthetic construct
  source 1..22: mol_type = other RNA
gagagaaaatgaaccactcttt

SEQ ID NO: 6234 - RNA, 22 nt, synthetic construct
  source 1..22: mol_type = other RNA
gagagagggaggaacttggact

SEQ ID NO: 6235 - RNA, 22 nt, synthetic construct
  source 1..22: mol_type = other RNA
gagagcatcaggaaggtggatg

SEQ ID NO: 6236 - RNA, 22 nt, synthetic construct
  source 1..22: mol_type = other RNA
gagaggagttatacagctctgc

SEQ ID NO: 6237 - RNA, 22 nt, synthetic construct
  source 1..22: mol_type = other RNA
gagagggaggaacttggacttc

SEQ ID NO: 6238 - RNA, 22 nt, synthetic construct
  source 1..22: mol_type = other RNA
gagagggcaaaggaactgccag

SEQ ID NO: 6239 - RNA, 22 nt, synthetic construct
  source 1..22: mol_type = other RNA
gagataaagggaaacagattgt

SEQ ID NO: 6240 - RNA, 22 nt, synthetic construct
  source 1..22: mol_type = other RNA
gagatgtccaatgtggaaatgg

SEQ ID NO: 6241 - RNA, 22 nt, synthetic construct
  source 1..22: mol_type = other RNA
gagatttgaatggggtttcagc

SEQ ID NO: 6242 - RNA, 22 nt, synthetic construct
  source 1..22: mol_type = other RNA
gagcaataggctataccatgta

SEQ ID NO: 6243 - RNA, 22 nt, synthetic construct
  source 1..22: mol_type = other RNA
gagcatcaggaaggtggatgat

SEQ ID NO: 6244 - RNA, 22 nt, synthetic construct
  source 1..22: mol_type = other RNA
gagccaggacctgaactctaat

SEQ ID NO: 6245 - RNA, 22 nt, synthetic construct
  source 1..22: mol_type = other RNA
gagctccagaagcaagagagag

SEQ ID NO: 6246 - RNA, 22 nt, synthetic construct
  source 1..22: mol_type = other RNA
gagctccttgtagttacatcta

SEQ ID NO: 6247 - RNA, 22 nt, synthetic construct
  source 1..22: mol_type = other RNA
gagctgtataactcctctcttc

SEQ ID NO: 6248 - RNA, 22 nt, synthetic construct
  source 1..22: mol_type = other RNA
gagctgtctataaatagtcctc

SEQ ID NO: 6249 - RNA, 22 nt, synthetic construct
  source 1..22: mol_type = other RNA
gaggaacttggacttctctgca

SEQ ID NO: 6250 - RNA, 22 nt, synthetic construct
  source 1..22: mol_type = other RNA
gaggactatttatagacagctc

SEQ ID NO: 6251 - RNA, 22 nt, synthetic construct
  source 1..22: mol_type = other RNA
gaggagagaaaatgaaccactc

SEQ ID NO: 6252 - RNA, 22 nt, synthetic construct
  source 1..22: mol_type = other RNA
gaggagataaagggaaacagat

SEQ ID NO: 6253 - RNA, 22 nt, synthetic construct
  source 1..22: mol_type = other RNA
gaggagttatacagctctgcag

SEQ ID NO: 6254 - RNA, 22 nt, synthetic construct
  source 1..22: mol_type = other RNA
gaggcaaacacagtccccatac

SEQ ID NO: 6255 - RNA, 22 nt, synthetic construct
  source 1..22: mol_type = other RNA
gagggaggaacttggacttctc

SEQ ID NO: 6256 - RNA, 22 nt, synthetic construct
  source 1..22: mol_type = other RNA
gagggcaaaggaactgccagta

SEQ ID NO: 6257 - RNA, 22 nt, synthetic construct
  source 1..22: mol_type = other RNA
gagggtcagtaatatggccata

SEQ ID NO: 6258 - RNA, 22 nt, synthetic construct
  source 1..22: mol_type = other RNA
gagggttatcatgttagagctg

SEQ ID NO: 6259 - RNA, 22 nt, synthetic construct
  source 1..22: mol_type = other RNA
gaggttcccaggccactagagg

SEQ ID NO: 6260 - RNA, 22 nt, synthetic construct
  source 1..22: mol_type = other RNA
gagtaacattttagcagggaaa

SEQ ID NO: 6261 - RNA, 22 nt, synthetic construct
  source 1..22: mol_type = other RNA
gagtccaaaggcttttcaatga

SEQ ID NO: 6262 - RNA, 22 nt, synthetic construct
  source 1..22: mol_type = other RNA
gagtggcatgaagaaggtgtat

SEQ ID NO: 6263 - RNA, 22 nt, synthetic construct
  source 1..22: mol_type = other RNA
gagtggttcattttctctcctc

SEQ ID NO: 6264 - RNA, 22 nt, synthetic construct
  source 1..22: mol_type = other RNA
gagttatacagctctgcagaca

SEQ ID NO: 6265 - RNA, 22 nt, synthetic construct
  source 1..22: mol_type = other RNA
gagttcaggtcctggctctaca

SEQ ID NO: 6266 - RNA, 22 nt, synthetic construct
  source 1..22: mol_type = other RNA
gataaaggcaggtggttaccca

SEQ ID NO: 6267 - RNA, 22 nt, synthetic construct
  source 1..22: mol_type = other RNA
gataaagggaaacagattgtta

SEQ ID NO: 6268 - RNA, 22 nt, synthetic construct
  source 1..22: mol_type = other RNA
gataaccctcactatgtggaga

SEQ ID NO: 6269 - RNA, 22 nt, synthetic construct
  source 1..22: mol_type = other RNA
gatcaaagccttgcaggtaatg

SEQ ID NO: 6270 - RNA, 22 nt, synthetic construct
  source 1..22: mol_type = other RNA
gatcatccaccttcctgatgct

SEQ ID NO: 6271 - RNA, 22 nt, synthetic construct
  source 1..22: mol_type = other RNA
gatctgcccagtcacactgtta

SEQ ID NO: 6272 - RNA, 22 nt, synthetic construct
  source 1..22: mol_type = other RNA
gatctttcttctgccatttcca

SEQ ID NO: 6273 - RNA, 22 nt, synthetic construct
  source 1..22: mol_type = other RNA
gatgatctgcccagtcacactg

SEQ ID NO: 6274 - RNA, 22 nt, synthetic construct
  source 1..22: mol_type = other RNA
gatgcagagaagtccaagttcc

SEQ ID NO: 6275 - RNA, 22 nt, synthetic construct
  source 1..22: mol_type = other RNA
gatgctctcccaaatcaattcc

SEQ ID NO: 6276 - RNA, 22 nt, synthetic construct
  source 1..22: mol_type = other RNA
gatgctgaaaccccattcaaat

SEQ ID NO: 6277 - RNA, 22 nt, synthetic construct
  source 1..22: mol_type = other RNA
gatgtaactacaaggagctcca

SEQ ID NO: 6278 - RNA, 22 nt, synthetic construct
  source 1..22: mol_type = other RNA
gatgtccaatgtggaaatggca

SEQ ID NO: 6279 - RNA, 22 nt, synthetic construct
  source 1..22: mol_type = other RNA
gatgtctgcagagctgtataac

SEQ ID NO: 6280 - RNA, 22 nt, synthetic construct
  source 1..22: mol_type = other RNA
gattcttctttccctgctaaaa

SEQ ID NO: 6281 - RNA, 22 nt, synthetic construct
  source 1..22: mol_type = other RNA
gatttgaatggggtttcagcat

SEQ ID NO: 6282 - RNA, 22 nt, synthetic construct
  source 1..22: mol_type = other RNA
gatttgggagagcatcaggaag

SEQ ID NO: 6283 - RNA, 22 nt, synthetic construct
  source 1..22: mol_type = other RNA
gcaaacacagtccccatacagg

SEQ ID NO: 6284 - RNA, 22 nt, synthetic construct
  source 1..22: mol_type = other RNA
gcaaaggaactgccagtatggt

SEQ ID NO: 6285 - RNA, 22 nt, synthetic construct
  source 1..22: mol_type = other RNA
gcaagagagagggaggaacttg

SEQ ID NO: 6286 - RNA, 22 nt, synthetic construct
  source 1..22: mol_type = other RNA
gcaaggctttgatctttcttct

SEQ ID NO: 6287 - RNA, 22 nt, synthetic construct
  source 1..22: mol_type = other RNA
gcaataccatactggcagttcc

SEQ ID NO: 6288 - RNA, 22 nt, synthetic construct
  source 1..22: mol_type = other RNA
gcaataggctataccatgtagc

SEQ ID NO: 6289 - RNA, 22 nt, synthetic construct
  source 1..22: mol_type = other RNA
gcagaagaaagatcaaagcctt

SEQ ID NO: 6290 - RNA, 22 nt, synthetic construct
  source 1..22: mol_type = other RNA
gcagacatcccattcctgtatg

SEQ ID NO: 6291 - RNA, 22 nt, synthetic construct
  source 1..22: mol_type = other RNA
gcagagaagtccaagttcctcc

SEQ ID NO: 6292 - RNA, 22 nt, synthetic construct
  source 1..22: mol_type = other RNA
gcagagatgtccaatgtggaaa

SEQ ID NO: 6293 - RNA, 22 nt, synthetic construct
  source 1..22: mol_type = other RNA
gcagagctgtataactcctctc

SEQ ID NO: 6294 - RNA, 22 nt, synthetic construct
  source 1..22: mol_type = other RNA
gcagatcatccaccttcctgat

SEQ ID NO: 6295 - RNA, 22 nt, synthetic construct
  source 1..22: mol_type = other RNA
gcaggataaaggcaggtggtta

SEQ ID NO: 6296 - RNA, 22 nt, synthetic construct
  source 1..22: mol_type = other RNA
gcagggaaagaagaatcctaca

SEQ ID NO: 6297 - RNA, 22 nt, synthetic construct
  source 1..22: mol_type = other RNA
gcaggtaatgtgggtaaccacc

SEQ ID NO: 6298 - RNA, 22 nt, synthetic construct
  source 1..22: mol_type = other RNA
gcaggtggttacccacattacc

SEQ ID NO: 6299 - RNA, 22 nt, synthetic construct
  source 1..22: mol_type = other RNA
gcagtagaatttcattgaaaag

SEQ ID NO: 6300 - RNA, 22 nt, synthetic construct
  source 1..22: mol_type = other RNA
gcagttcctttgccctctctgt

SEQ ID NO: 6301 - RNA, 22 nt, synthetic construct
  source 1..22: mol_type = other RNA
gcataggctacatggtatagcc

SEQ ID NO: 6302 - RNA, 22 nt, synthetic construct
  source 1..22: mol_type = other RNA
gcatcaatgtaccctgggcagt

SEQ ID NO: 6303 - RNA, 22 nt, synthetic construct
  source 1..22: mol_type = other RNA
gcatcaggaaggtggatgatct

SEQ ID NO: 6304 - RNA, 22 nt, synthetic construct
  source 1..22: mol_type = other RNA
gcatctttagttggagtccaaa

SEQ ID NO: 6305 - RNA, 22 nt, synthetic construct
  source 1..22: mol_type = other RNA
gcatgaagaaggtgtatggccc

SEQ ID NO: 6306 - RNA, 22 nt, synthetic construct
  source 1..22: mol_type = other RNA
gcatttctcagaacatgtcccc

SEQ ID NO: 6307 - RNA, 22 nt, synthetic construct
  source 1..22: mol_type = other RNA
gccactagaggagataaaggga

SEQ ID NO: 6308 - RNA, 22 nt, synthetic construct
  source 1..22: mol_type = other RNA
gccactccacaggagaagggaa

SEQ ID NO: 6309 - RNA, 22 nt, synthetic construct
  source 1..22: mol_type = other RNA
gccaggacctgaactctaatat

SEQ ID NO: 6310 - RNA, 22 nt, synthetic construct
  source 1..22: mol_type = other RNA
gccagtatggtattgcaggata

SEQ ID NO: 6311 - RNA, 22 nt, synthetic construct
  source 1..22: mol_type = other RNA
gccatacaccttcttcatgcca

SEQ ID NO: 6312 - RNA, 22 nt, synthetic construct
  source 1..22: mol_type = other RNA
gccatacctggggccatacacc

SEQ ID NO: 6313 - RNA, 22 nt, synthetic construct
  source 1..22: mol_type = other RNA
gccatattactgaccctctaca

SEQ ID NO: 6314 - RNA, 22 nt, synthetic construct
  source 1..22: mol_type = other RNA
gccatttccacattggacatct

SEQ ID NO: 6315 - RNA, 22 nt, synthetic construct
  source 1..22: mol_type = other RNA
gcccacagtattcagtacagta

SEQ ID NO: 6316 - RNA, 22 nt, synthetic construct
  source 1..22: mol_type = other RNA
gcccagggtacattgatgctga

SEQ ID NO: 6317 - RNA, 22 nt, synthetic construct
  source 1..22: mol_type = other RNA
gcccagtcacactgttagtaaa

SEQ ID NO: 6318 - RNA, 22 nt, synthetic construct
  source 1..22: mol_type = other RNA
gccccaggtatggccatattac

SEQ ID NO: 6319 - RNA, 22 nt, synthetic construct
  source 1..22: mol_type = other RNA
gccctctctgtagagggtcagt

SEQ ID NO: 6320 - RNA, 22 nt, synthetic construct
  source 1..22: mol_type = other RNA
gcctactacacgcataggctac

SEQ ID NO: 6321 - RNA, 22 nt, synthetic construct
  source 1..22: mol_type = other RNA
gcctatgcgtgtagtaggctac

SEQ ID NO: 6322 - RNA, 22 nt, synthetic construct
  source 1..22: mol_type = other RNA
gcctcttagaggttcccaggcc

SEQ ID NO: 6323 - RNA, 22 nt, synthetic construct
  source 1..22: mol_type = other RNA
gcctgggaacctctaagaggca

SEQ ID NO: 6324 - RNA, 22 nt, synthetic construct
  source 1..22: mol_type = other RNA
gcctgttactgtactgaatact

SEQ ID NO: 6325 - RNA, 22 nt, synthetic construct
  source 1..22: mol_type = other RNA
gccttgcaggtaatgtgggtaa

SEQ ID NO: 6326 - RNA, 22 nt, synthetic construct
  source 1..22: mol_type = other RNA
gcctttatcctgcaataccata

SEQ ID NO: 6327 - RNA, 22 nt, synthetic construct
  source 1..22: mol_type = other RNA
gcctttggactccaactaaaga

SEQ ID NO: 6328 - RNA, 22 nt, synthetic construct
  source 1..22: mol_type = other RNA
gcgtgtagtaggctacaacacc

SEQ ID NO: 6329 - RNA, 22 nt, synthetic construct
  source 1..22: mol_type = other RNA
gctaaaatgttactctgtcaat

SEQ ID NO: 6330 - RNA, 22 nt, synthetic construct
  source 1..22: mol_type = other RNA
gctacaacacctaggtttgtgt

SEQ ID NO: 6331 - RNA, 22 nt, synthetic construct
  source 1..22: mol_type = other RNA
gctacatggtatagcctattgc

SEQ ID NO: 6332 - RNA, 22 nt, synthetic construct
  source 1..22: mol_type = other RNA
gctataccatgtagcctatgcg

SEQ ID NO: 6333 - RNA, 22 nt, synthetic construct
  source 1..22: mol_type = other RNA
gctccagaagcaagagagaggg

SEQ ID NO: 6334 - RNA, 22 nt, synthetic construct
  source 1..22: mol_type = other RNA
gctcctagactacaaacctgta

SEQ ID NO: 6335 - RNA, 22 nt, synthetic construct
  source 1..22: mol_type = other RNA
gctccttgtagttacatctatt

SEQ ID NO: 6336 - RNA, 22 nt, synthetic construct
  source 1..22: mol_type = other RNA
gctctaacatgataaccctcac

SEQ ID NO: 6337 - RNA, 22 nt, synthetic construct
  source 1..22: mol_type = other RNA
gctctacaatttactaacagtg

SEQ ID NO: 6338 - RNA, 22 nt, synthetic construct
  source 1..22: mol_type = other RNA
gctctcccaaatcaattccctg

SEQ ID NO: 6339 - RNA, 22 nt, synthetic construct
  source 1..22: mol_type = other RNA
gctctgcagacatcccattcct

SEQ ID NO: 6340 - RNA, 22 nt, synthetic construct
  source 1..22: mol_type = other RNA
gctgaaaccccattcaaatctc

SEQ ID NO: 6341 - RNA, 22 nt, synthetic construct
  source 1..22: mol_type = other RNA
gctgaggagagaaaatgaacca

SEQ ID NO: 6342 - RNA, 22 nt, synthetic construct
  source 1..22: mol_type = other RNA
gctgtataactcctctcttctg

SEQ ID NO: 6343 - RNA, 22 nt, synthetic construct
  source 1..22: mol_type = other RNA
gctgtctataaatagtcctcag

SEQ ID NO: 6344 - RNA, 22 nt, synthetic construct
  source 1..22: mol_type = other RNA
gcttacacaaacctaggtgttg

SEQ ID NO: 6345 - RNA, 22 nt, synthetic construct
  source 1..22: mol_type = other RNA
gcttctggagctccttgtagtt

SEQ ID NO: 6346 - RNA, 22 nt, synthetic construct
  source 1..22: mol_type = other RNA
gctttgatctttcttctgccat

SEQ ID NO: 6347 - RNA, 22 nt, synthetic construct
  source 1..22: mol_type = other RNA
gcttttcaatgaaattctactg

SEQ ID NO: 6348 - RNA, 22 nt, synthetic construct
  source 1..22: mol_type = other RNA
ggaaaagagtggttcattttct

SEQ ID NO: 6349 - RNA, 22 nt, synthetic construct
  source 1..22: mol_type = other RNA
ggaaacagattgttataacttg

SEQ ID NO: 6350 - RNA, 22 nt, synthetic construct
  source 1..22: mol_type = other RNA
ggaaagaagaatcctacagggt

SEQ ID NO: 6351 - RNA, 22 nt, synthetic construct
  source 1..22: mol_type = other RNA
ggaaatggcagaagaaagatca

SEQ ID NO: 6352 - RNA, 22 nt, synthetic construct
  source 1..22: mol_type = other RNA
ggaacatgaccctgtaggattc

SEQ ID NO: 6353 - RNA, 22 nt, synthetic construct
  source 1..22: mol_type = other RNA
ggaacctctaagaggcaaacac

SEQ ID NO: 6354 - RNA, 22 nt, synthetic construct
  source 1..22: mol_type = other RNA
ggaactgccagtatggtattgc

SEQ ID NO: 6355 - RNA, 22 nt, synthetic construct
  source 1..22: mol_type = other RNA
ggaacttggacttctctgcatc

SEQ ID NO: 6356 - RNA, 22 nt, synthetic construct
  source 1..22: mol_type = other RNA
ggaaggtggatgatctgcccag

SEQ ID NO: 6357 - RNA, 22 nt, synthetic construct
  source 1..22: mol_type = other RNA
ggaatgggatgtctgcagagct

SEQ ID NO: 6358 - RNA, 22 nt, synthetic construct
  source 1..22: mol_type = other RNA
ggaattgatttgggagagcatc

SEQ ID NO: 6359 - RNA, 22 nt, synthetic construct
  source 1..22: mol_type = other RNA
ggacagtgaaacaaaaacattt

SEQ ID NO: 6360 - RNA, 22 nt, synthetic construct
  source 1..22: mol_type = other RNA
ggacatctctgctgaggagaga

SEQ ID NO: 6361 - RNA, 22 nt, synthetic construct
  source 1..22: mol_type = other RNA
ggacatgttctgagaaatgctt

SEQ ID NO: 6362 - RNA, 22 nt, synthetic construct
  source 1..22: mol_type = other RNA
ggacctgaactctaatatagtc

SEQ ID NO: 6363 - RNA, 22 nt, synthetic construct
  source 1..22: mol_type = other RNA
ggactatttatagacagctcta

SEQ ID NO: 6364 - RNA, 22 nt, synthetic construct
  source 1..22: mol_type = other RNA
ggactccaactaaagatgcaga

SEQ ID NO: 6365 - RNA, 22 nt, synthetic construct
  source 1..22: mol_type = other RNA
ggactgtgtttgcctcttagag

SEQ ID NO: 6366 - RNA, 22 nt, synthetic construct
  source 1..22: mol_type = other RNA
ggacttctctgcatctttagtt

SEQ ID NO: 6367 - RNA, 22 nt, synthetic construct
  source 1..22: mol_type = other RNA
ggagaacattgacagagtaaca

SEQ ID NO: 6368 - RNA, 22 nt, synthetic construct
  source 1..22: mol_type = other RNA
ggagaagggaacatgaccctgt

SEQ ID NO: 6369 - RNA, 22 nt, synthetic construct
  source 1..22: mol_type = other RNA
ggagagaaaatgaaccactctt

SEQ ID NO: 6370 - RNA, 22 nt, synthetic construct
  source 1..22: mol_type = other RNA
ggagagcatcaggaaggtggat

SEQ ID NO: 6371 - RNA, 22 nt, synthetic construct
  source 1..22: mol_type = other RNA
ggagataaagggaaacagattg

SEQ ID NO: 6372 - RNA, 22 nt, synthetic construct
  source 1..22: mol_type = other RNA
ggagatttgaatggggtttcag

SEQ ID NO: 6373 - RNA, 22 nt, synthetic construct
  source 1..22: mol_type = other RNA
ggagctccagaagcaagagaga

SEQ ID NO: 6374 - RNA, 22 nt, synthetic construct
  source 1..22: mol_type = other RNA
ggagctccttgtagttacatct

SEQ ID NO: 6375 - RNA, 22 nt, synthetic construct
  source 1..22: mol_type = other RNA
ggaggaacttggacttctctgc

SEQ ID NO: 6376 - RNA, 22 nt, synthetic construct
  source 1..22: mol_type = other RNA
ggagtccaaaggcttttcaatg

SEQ ID NO: 6377 - RNA, 22 nt, synthetic construct
  source 1..22: mol_type = other RNA
ggagtggcatgaagaaggtgta

SEQ ID NO: 6378 - RNA, 22 nt, synthetic construct
  source 1..22: mol_type = other RNA
ggagttatacagctctgcagac

SEQ ID NO: 6379 - RNA, 22 nt, synthetic construct
  source 1..22: mol_type = other RNA
ggataaaggcaggtggttaccc

SEQ ID NO: 6380 - RNA, 22 nt, synthetic construct
  source 1..22: mol_type = other RNA
ggatgatctgcccagtcacact

SEQ ID NO: 6381 - RNA, 22 nt, synthetic construct
  source 1..22: mol_type = other RNA
ggatgtctgcagagctgtataa

SEQ ID NO: 6382 - RNA, 22 nt, synthetic construct
  source 1..22: mol_type = other RNA
ggattcttctttccctgctaaa

SEQ ID NO: 6383 - RNA, 22 nt, synthetic construct
  source 1..22: mol_type = other RNA
ggcaaacacagtccccatacag

SEQ ID NO: 6384 - RNA, 22 nt, synthetic construct
  source 1..22: mol_type = other RNA
ggcaaaggaactgccagtatgg

SEQ ID NO: 6385 - RNA, 22 nt, synthetic construct
  source 1..22: mol_type = other RNA
ggcagaagaaagatcaaagcct

SEQ ID NO: 6386 - RNA, 22 nt, synthetic construct
  source 1..22: mol_type = other RNA
ggcagatcatccaccttcctga

SEQ ID NO: 6387 - RNA, 22 nt, synthetic construct
  source 1..22: mol_type = other RNA
ggcaggtggttacccacattac

SEQ ID NO: 6388 - RNA, 22 nt, synthetic construct
  source 1..22: mol_type = other RNA
ggcagtagaatttcattgaaaa

SEQ ID NO: 6389 - RNA, 22 nt, synthetic construct
  source 1..22: mol_type = other RNA
ggcagttcctttgccctctctg

SEQ ID NO: 6390 - RNA, 22 nt, synthetic construct
  source 1..22: mol_type = other RNA
ggcatgaagaaggtgtatggcc

SEQ ID NO: 6391 - RNA, 22 nt, synthetic construct
  source 1..22: mol_type = other RNA
ggccactagaggagataaaggg

SEQ ID NO: 6392 - RNA, 22 nt, synthetic construct
  source 1..22: mol_type = other RNA
ggccatacaccttcttcatgcc

SEQ ID NO: 6393 - RNA, 22 nt, synthetic construct
  source 1..22: mol_type = other RNA
ggccatacctggggccatacac

SEQ ID NO: 6394 - RNA, 22 nt, synthetic construct
  source 1..22: mol_type = other RNA
ggccatattactgaccctctac

SEQ ID NO: 6395 - RNA, 22 nt, synthetic construct
  source 1..22: mol_type = other RNA
ggccccaggtatggccatatta

SEQ ID NO: 6396 - RNA, 22 nt, synthetic construct
  source 1..22: mol_type = other RNA
ggcctgggaacctctaagaggc

SEQ ID NO: 6397 - RNA, 22 nt, synthetic construct
  source 1..22: mol_type = other RNA
ggctacaacacctaggtttgtg

SEQ ID NO: 6398 - RNA, 22 nt, synthetic construct
  source 1..22: mol_type = other RNA
ggctacatggtatagcctattg

SEQ ID NO: 6399 - RNA, 22 nt, synthetic construct
  source 1..22: mol_type = other RNA
ggctataccatgtagcctatgc

SEQ ID NO: 6400 - RNA, 22 nt, synthetic construct
  source 1..22: mol_type = other RNA
ggctctacaatttactaacagt

SEQ ID NO: 6401 - RNA, 22 nt, synthetic construct
  source 1..22: mol_type = other RNA
ggctgtacaggtttgtagtcta

SEQ ID NO: 6402 - RNA, 22 nt, synthetic construct
  source 1..22: mol_type = other RNA
ggctttgatctttcttctgcca

SEQ ID NO: 6403 - RNA, 22 nt, synthetic construct
  source 1..22: mol_type = other RNA
ggcttttcaatgaaattctact

SEQ ID NO: 6404 - RNA, 22 nt, synthetic construct
  source 1..22: mol_type = other RNA
gggaaacagattgttataactt

SEQ ID NO: 6405 - RNA, 22 nt, synthetic construct
  source 1..22: mol_type = other RNA
gggaaagaagaatcctacaggg

SEQ ID NO: 6406 - RNA, 22 nt, synthetic construct
  source 1..22: mol_type = other RNA
gggaacatgaccctgtaggatt

SEQ ID NO: 6407 - RNA, 22 nt, synthetic construct
  source 1..22: mol_type = other RNA
gggaacctctaagaggcaaaca

SEQ ID NO: 6408 - RNA, 22 nt, synthetic construct
  source 1..22: mol_type = other RNA
gggaattgatttgggagagcat

SEQ ID NO: 6409 - RNA, 22 nt, synthetic construct
  source 1..22: mol_type = other RNA
gggacatgttctgagaaatgct

SEQ ID NO: 6410 - RNA, 22 nt, synthetic construct
  source 1..22: mol_type = other RNA
gggactgtgtttgcctcttaga

SEQ ID NO: 6411 - RNA, 22 nt, synthetic construct
  source 1..22: mol_type = other RNA
gggagagcatcaggaaggtgga

SEQ ID NO: 6412 - RNA, 22 nt, synthetic construct
  source 1..22: mol_type = other RNA
gggaggaacttggacttctctg

SEQ ID NO: 6413 - RNA, 22 nt, synthetic construct
  source 1..22: mol_type = other RNA
gggatgtctgcagagctgtata

SEQ ID NO: 6414 - RNA, 22 nt, synthetic construct
  source 1..22: mol_type = other RNA
gggcaaaggaactgccagtatg

SEQ ID NO: 6415 - RNA, 22 nt, synthetic construct
  source 1..22: mol_type = other RNA
gggcagatcatccaccttcctg

SEQ ID NO: 6416 - RNA, 22 nt, synthetic construct
  source 1..22: mol_type = other RNA
gggcagtagaatttcattgaaa

SEQ ID NO: 6417 - RNA, 22 nt, synthetic construct
  source 1..22: mol_type = other RNA
gggccatacaccttcttcatgc

SEQ ID NO: 6418 - RNA, 22 nt, synthetic construct
  source 1..22: mol_type = other RNA
ggggacatgttctgagaaatgc

SEQ ID NO: 6419 - RNA, 22 nt, synthetic construct
  source 1..22: mol_type = other RNA
ggggactgtgtttgcctcttag

SEQ ID NO: 6420 - RNA, 22 nt, synthetic construct
  source 1..22: mol_type = other RNA
ggggccatacaccttcttcatg

SEQ ID NO: 6421 - RNA, 22 nt, synthetic construct
  source 1..22: mol_type = other RNA
ggggtttcagcatcaatgtacc

SEQ ID NO: 6422 - RNA, 22 nt, synthetic construct
  source 1..22: mol_type = other RNA
gggtaaccacctgcctttatcc

SEQ ID NO: 6423 - RNA, 22 nt, synthetic construct
  source 1..22: mol_type = other RNA
gggtacattgatgctgaaaccc

SEQ ID NO: 6424 - RNA, 22 nt, synthetic construct
  source 1..22: mol_type = other RNA
gggtcagtaatatggccatacc

SEQ ID NO: 6425 - RNA, 22 nt, synthetic construct
  source 1..22: mol_type = other RNA
gggtcatgttcccttctcctgt

SEQ ID NO: 6426 - RNA, 22 nt, synthetic construct
  source 1..22: mol_type = other RNA
gggttatcatgttagagctgtc

SEQ ID NO: 6427 - RNA, 22 nt, synthetic construct
  source 1..22: mol_type = other RNA
gggtttcagcatcaatgtaccc

SEQ ID NO: 6428 - RNA, 22 nt, synthetic construct
  source 1..22: mol_type = other RNA
ggtaaccacctgcctttatcct

SEQ ID NO: 6429 - RNA, 22 nt, synthetic construct
  source 1..22: mol_type = other RNA
ggtaatgtgggtaaccacctgc

SEQ ID NO: 6430 - RNA, 22 nt, synthetic construct
  source 1..22: mol_type = other RNA
ggtacattgatgctgaaacccc

SEQ ID NO: 6431 - RNA, 22 nt, synthetic construct
  source 1..22: mol_type = other RNA
ggtatggccatattactgaccc

SEQ ID NO: 6432 - RNA, 22 nt, synthetic construct
  source 1..22: mol_type = other RNA
ggtattgcaggataaaggcagg

SEQ ID NO: 6433 - RNA, 22 nt, synthetic construct
  source 1..22: mol_type = other RNA
ggtcagtaatatggccatacct

SEQ ID NO: 6434 - RNA, 22 nt, synthetic construct
  source 1..22: mol_type = other RNA
ggtcatgttcccttctcctgtg

SEQ ID NO: 6435 - RNA, 22 nt, synthetic construct
  source 1..22: mol_type = other RNA
ggtcctggctctacaatttact

SEQ ID NO: 6436 - RNA, 22 nt, synthetic construct
  source 1..22: mol_type = other RNA
ggtggatgatctgcccagtcac

SEQ ID NO: 6437 - RNA, 22 nt, synthetic construct
  source 1..22: mol_type = other RNA
ggtggttacccacattacctgc

SEQ ID NO: 6438 - RNA, 22 nt, synthetic construct
  source 1..22: mol_type = other RNA
ggtgtatggccccaggtatggc

SEQ ID NO: 6439 - RNA, 22 nt, synthetic construct
  source 1..22: mol_type = other RNA
ggtgttgtagcctactacacgc

SEQ ID NO: 6440 - RNA, 22 nt, synthetic construct
  source 1..22: mol_type = other RNA
ggttacccacattacctgcaag

SEQ ID NO: 6441 - RNA, 22 nt, synthetic construct
  source 1..22: mol_type = other RNA
ggttatcatgttagagctgtct

SEQ ID NO: 6442 - RNA, 22 nt, synthetic construct
  source 1..22: mol_type = other RNA
ggttcattttctctcctcagca

SEQ ID NO: 6443 - RNA, 22 nt, synthetic construct
  source 1..22: mol_type = other RNA
ggttcccaggccactagaggag

SEQ ID NO: 6444 - RNA, 22 nt, synthetic construct
  source 1..22: mol_type = other RNA
ggtttcagcatcaatgtaccct

SEQ ID NO: 6445 - RNA, 22 nt, synthetic construct
  source 1..22: mol_type = other RNA
ggtttgtgtaagcatttctcag

SEQ ID NO: 6446 - RNA, 22 nt, synthetic construct
  source 1..22: mol_type = other RNA
gtaaattgtagagccaggacct

SEQ ID NO: 6447 - RNA, 22 nt, synthetic construct
  source 1..22: mol_type = other RNA
gtaacacatgactatattagag

SEQ ID NO: 6448 - RNA, 22 nt, synthetic construct
  source 1..22: mol_type = other RNA
gtaacaggctgtacaggtttgt

SEQ ID NO: 6449 - RNA, 22 nt, synthetic construct
  source 1..22: mol_type = other RNA
gtaacattttagcagggaaaga

SEQ ID NO: 6450 - RNA, 22 nt, synthetic construct
  source 1..22: mol_type = other RNA
gtaaccacctgcctttatcctg

SEQ ID NO: 6451 - RNA, 22 nt, synthetic construct
  source 1..22: mol_type = other RNA
gtaactacaaggagctccagaa

SEQ ID NO: 6452 - RNA, 22 nt, synthetic construct
  source 1..22: mol_type = other RNA
gtaagcatttctcagaacatgt

SEQ ID NO: 6453 - RNA, 22 nt, synthetic construct
  source 1..22: mol_type = other RNA
gtaagtttttgaccttgagaaa

SEQ ID NO: 6454 - RNA, 22 nt, synthetic construct
  source 1..22: mol_type = other RNA
gtaatatggccatacctggggc

SEQ ID NO: 6455 - RNA, 22 nt, synthetic construct
  source 1..22: mol_type = other RNA
gtaatgtgggtaaccacctgcc

SEQ ID NO: 6456 - RNA, 22 nt, synthetic construct
  source 1..22: mol_type = other RNA
gtacagcctgttactgtactga

SEQ ID NO: 6457 - RNA, 22 nt, synthetic construct
  source 1..22: mol_type = other RNA
gtacagtaacaggctgtacagg

SEQ ID NO: 6458 - RNA, 22 nt, synthetic construct
  source 1..22: mol_type = other RNA
gtacattgatgctgaaacccca

SEQ ID NO: 6459 - RNA, 22 nt, synthetic construct
  source 1..22: mol_type = other RNA
gtaccctgggcagtagaatttc

SEQ ID NO: 6460 - RNA, 22 nt, synthetic construct
  source 1..22: mol_type = other RNA
gtagaatttcattgaaaagcct

SEQ ID NO: 6461 - RNA, 22 nt, synthetic construct
  source 1..22: mol_type = other RNA
gtagagccaggacctgaactct

SEQ ID NO: 6462 - RNA, 22 nt, synthetic construct
  source 1..22: mol_type = other RNA
gtagagggtcagtaatatggcc

SEQ ID NO: 6463 - RNA, 22 nt, synthetic construct
  source 1..22: mol_type = other RNA
gtagcctactacacgcataggc

SEQ ID NO: 6464 - RNA, 22 nt, synthetic construct
  source 1..22: mol_type = other RNA
gtagcctatgcgtgtagtaggc

SEQ ID NO: 6465 - RNA, 22 nt, synthetic construct
  source 1..22: mol_type = other RNA
gtaggattcttctttccctgct

SEQ ID NO: 6466 - RNA, 22 nt, synthetic construct
  source 1..22: mol_type = other RNA
gtaggctacaacacctaggttt

SEQ ID NO: 6467 - RNA, 22 nt, synthetic construct
  source 1..22: mol_type = other RNA
gtagtaggctacaacacctagg

SEQ ID NO: 6468 - RNA, 22 nt, synthetic construct
  source 1..22: mol_type = other RNA
gtagtctaggagcaataggcta

SEQ ID NO: 6469 - RNA, 22 nt, synthetic construct
  source 1..22: mol_type = other RNA
gtataactcctctcttctgtct

SEQ ID NO: 6470 - RNA, 22 nt, synthetic construct
  source 1..22: mol_type = other RNA
gtatggccatattactgaccct

SEQ ID NO: 6471 - RNA, 22 nt, synthetic construct
  source 1..22: mol_type = other RNA
gtatggccccaggtatggccat

SEQ ID NO: 6472 - RNA, 22 nt, synthetic construct
  source 1..22: mol_type = other RNA
gtatggggactgtgtttgcctc

SEQ ID NO: 6473 - RNA, 22 nt, synthetic construct
  source 1..22: mol_type = other RNA
gtatggtattgcaggataaagg

SEQ ID NO: 6474 - RNA, 22 nt, synthetic construct
  source 1..22: mol_type = other RNA
gtattgcaggataaaggcaggt

SEQ ID NO: 6475 - RNA, 22 nt, synthetic construct
  source 1..22: mol_type = other RNA
gtcaatgttctccacatagtga

SEQ ID NO: 6476 - RNA, 22 nt, synthetic construct
  source 1..22: mol_type = other RNA
gtcacactgttagtaaattgta

SEQ ID NO: 6477 - RNA, 22 nt, synthetic construct
  source 1..22: mol_type = other RNA
gtcagtaatatggccatacctg

SEQ ID NO: 6478 - RNA, 22 nt, synthetic construct
  source 1..22: mol_type = other RNA
gtcatgtgttacttaatgacgg

SEQ ID NO: 6479 - RNA, 22 nt, synthetic construct
  source 1..22: mol_type = other RNA
gtcatgttcccttctcctgtgg

SEQ ID NO: 6480 - RNA, 22 nt, synthetic construct
  source 1..22: mol_type = other RNA
gtcattaagtaacacatgacta

SEQ ID NO: 6481 - RNA, 22 nt, synthetic construct
  source 1..22: mol_type = other RNA
gtccaaaggcttttcaatgaaa

SEQ ID NO: 6482 - RNA, 22 nt, synthetic construct
  source 1..22: mol_type = other RNA
gtccaagttcctccctctctct

SEQ ID NO: 6483 - RNA, 22 nt, synthetic construct
  source 1..22: mol_type = other RNA
gtccaatgtggaaatggcagaa

SEQ ID NO: 6484 - RNA, 22 nt, synthetic construct
  source 1..22: mol_type = other RNA
gtccccatacaggaatgggatg

SEQ ID NO: 6485 - RNA, 22 nt, synthetic construct
  source 1..22: mol_type = other RNA
gtccccgtcattaagtaacaca

SEQ ID NO: 6486 - RNA, 22 nt, synthetic construct
  source 1..22: mol_type = other RNA
gtcctcaggacagtgaaacaaa

SEQ ID NO: 6487 - RNA, 22 nt, synthetic construct
  source 1..22: mol_type = other RNA
gtcctgaggactatttatagac

SEQ ID NO: 6488 - RNA, 22 nt, synthetic construct
  source 1..22: mol_type = other RNA
gtcctggctctacaatttacta

SEQ ID NO: 6489 - RNA, 22 nt, synthetic construct
  source 1..22: mol_type = other RNA
gtctaggagcaataggctatac

SEQ ID NO: 6490 - RNA, 22 nt, synthetic construct
  source 1..22: mol_type = other RNA
gtctataaatagtcctcaggac

SEQ ID NO: 6491 - RNA, 22 nt, synthetic construct
  source 1..22: mol_type = other RNA
gtctgaagaataaaacaacatt

SEQ ID NO: 6492 - RNA, 22 nt, synthetic construct
  source 1..22: mol_type = other RNA
gtctgcagagctgtataactcc

SEQ ID NO: 6493 - RNA, 22 nt, synthetic construct
  source 1..22: mol_type = other RNA
gtgaaacaaaaacattttctca

SEQ ID NO: 6494 - RNA, 22 nt, synthetic construct
  source 1..22: mol_type = other RNA
gtgactgggcagatcatccacc

SEQ ID NO: 6495 - RNA, 22 nt, synthetic construct
  source 1..22: mol_type = other RNA
gtgagggttatcatgttagagc

SEQ ID NO: 6496 - RNA, 22 nt, synthetic construct
  source 1..22: mol_type = other RNA
gtggaaatggcagaagaaagat

SEQ ID NO: 6497 - RNA, 22 nt, synthetic construct
  source 1..22: mol_type = other RNA
gtggagaacattgacagagtaa

SEQ ID NO: 6498 - RNA, 22 nt, synthetic construct
  source 1..22: mol_type = other RNA
gtggagtggcatgaagaaggtg

SEQ ID NO: 6499 - RNA, 22 nt, synthetic construct
  source 1..22: mol_type = other RNA
gtggatgatctgcccagtcaca

SEQ ID NO: 6500 - RNA, 22 nt, synthetic construct
  source 1..22: mol_type = other RNA
gtggcatgaagaaggtgtatgg

SEQ ID NO: 6501 - RNA, 22 nt, synthetic construct
  source 1..22: mol_type = other RNA
gtggcctgggaacctctaagag

SEQ ID NO: 6502 - RNA, 22 nt, synthetic construct
  source 1..22: mol_type = other RNA
gtgggtaaccacctgcctttat

SEQ ID NO: 6503 - RNA, 22 nt, synthetic construct
  source 1..22: mol_type = other RNA
gtggttacccacattacctgca

SEQ ID NO: 6504 - RNA, 22 nt, synthetic construct
  source 1..22: mol_type = other RNA
gtggttcattttctctcctcag

SEQ ID NO: 6505 - RNA, 22 nt, synthetic construct
  source 1..22: mol_type = other RNA
gtgtaagcatttctcagaacat

SEQ ID NO: 6506 - RNA, 22 nt, synthetic construct
  source 1..22: mol_type = other RNA
gtgtagtaggctacaacaccta

SEQ ID NO: 6507 - RNA, 22 nt, synthetic construct
  source 1..22: mol_type = other RNA
gtgtatggccccaggtatggcc

SEQ ID NO: 6508 - RNA, 22 nt, synthetic construct
  source 1..22: mol_type = other RNA
gtgtgactgggcagatcatcca

SEQ ID NO: 6509 - RNA, 22 nt, synthetic construct
  source 1..22: mol_type = other RNA
gtgttacttaatgacggggaca

SEQ ID NO: 6510 - RNA, 22 nt, synthetic construct
  source 1..22: mol_type = other RNA
gtgttgtagcctactacacgca

SEQ ID NO: 6511 - RNA, 22 nt, synthetic construct
  source 1..22: mol_type = other RNA
gtgtttgcctcttagaggttcc

SEQ ID NO: 6512 - RNA, 22 nt, synthetic construct
  source 1..22: mol_type = other RNA
gttacccacattacctgcaagg

SEQ ID NO: 6513 - RNA, 22 nt, synthetic construct
  source 1..22: mol_type = other RNA
gttactctgtcaatgttctcca

SEQ ID NO: 6514 - RNA, 22 nt, synthetic construct
  source 1..22: mol_type = other RNA
gttacttaatgacggggacatg

SEQ ID NO: 6515 - RNA, 22 nt, synthetic construct
  source 1..22: mol_type = other RNA
gttagagctgtctataaatagt

SEQ ID NO: 6516 - RNA, 22 nt, synthetic construct
  source 1..22: mol_type = other RNA
gttagtaaattgtagagccagg

SEQ ID NO: 6517 - RNA, 22 nt, synthetic construct
  source 1..22: mol_type = other RNA
gttataacaatctgtttccctt

SEQ ID NO: 6518 - RNA, 22 nt, synthetic construct
  source 1..22: mol_type = other RNA
gttatacagctctgcagacatc

SEQ ID NO: 6519 - RNA, 22 nt, synthetic construct
  source 1..22: mol_type = other RNA
gttatattctagaacagggaat

SEQ ID NO: 6520 - RNA, 22 nt, synthetic construct
  source 1..22: mol_type = other RNA
gttatcatgttagagctgtcta

SEQ ID NO: 6521 - RNA, 22 nt, synthetic construct
  source 1..22: mol_type = other RNA
gttcaggtcctggctctacaat

SEQ ID NO: 6522 - RNA, 22 nt, synthetic construct
  source 1..22: mol_type = other RNA
gttcattttctctcctcagcag

SEQ ID NO: 6523 - RNA, 22 nt, synthetic construct
  source 1..22: mol_type = other RNA
gttcccaggccactagaggaga

SEQ ID NO: 6524 - RNA, 22 nt, synthetic construct
  source 1..22: mol_type = other RNA
gttcccttctcctgtggagtgg

SEQ ID NO: 6525 - RNA, 22 nt, synthetic construct
  source 1..22: mol_type = other RNA
gttcctccctctctcttgcttc

SEQ ID NO: 6526 - RNA, 22 nt, synthetic construct
  source 1..22: mol_type = other RNA
gttcctttgccctctctgtaga

SEQ ID NO: 6527 - RNA, 22 nt, synthetic construct
  source 1..22: mol_type = other RNA
gttctagaatataacaggagat

SEQ ID NO: 6528 - RNA, 22 nt, synthetic construct
  source 1..22: mol_type = other RNA
gttctccacatagtgagggtta

SEQ ID NO: 6529 - RNA, 22 nt, synthetic construct
  source 1..22: mol_type = other RNA
gttctgagaaatgcttacacaa

SEQ ID NO: 6530 - RNA, 22 nt, synthetic construct
  source 1..22: mol_type = other RNA
gttggagtccaaaggcttttca

SEQ ID NO: 6531 - RNA, 22 nt, synthetic construct
  source 1..22: mol_type = other RNA
gttgtagcctactacacgcata

SEQ ID NO: 6532 - RNA, 22 nt, synthetic construct
  source 1..22: mol_type = other RNA
gttgttttattcttcagacaga

SEQ ID NO: 6533 - RNA, 22 nt, synthetic construct
  source 1..22: mol_type = other RNA
gtttcactgtcctgaggactat

SEQ ID NO: 6534 - RNA, 22 nt, synthetic construct
  source 1..22: mol_type = other RNA
gtttcagcatcaatgtaccctg

SEQ ID NO: 6535 - RNA, 22 nt, synthetic construct
  source 1..22: mol_type = other RNA
gtttccctttatctcctctagt

SEQ ID NO: 6536 - RNA, 22 nt, synthetic construct
  source 1..22: mol_type = other RNA
gtttgcctcttagaggttccca

SEQ ID NO: 6537 - RNA, 22 nt, synthetic construct
  source 1..22: mol_type = other RNA
gtttgtgtaagcatttctcaga

SEQ ID NO: 6538 - RNA, 22 nt, synthetic construct
  source 1..22: mol_type = other RNA
gttttattcttcagacagaaga

SEQ ID NO: 6539 - RNA, 22 nt, synthetic construct
  source 1..22: mol_type = other RNA
gtttttgaccttgagaaaatgt

SEQ ID NO: 6540 - RNA, 22 nt, synthetic construct
  source 1..22: mol_type = other RNA
gtttttgtttcactgtcctgag

SEQ ID NO: 6541 - RNA, 22 nt, synthetic construct
  source 1..22: mol_type = other RNA
taaaatgttactctgtcaatgt

SEQ ID NO: 6542 - RNA, 22 nt, synthetic construct
  source 1..22: mol_type = other RNA
taaagatgcagagaagtccaag

SEQ ID NO: 6543 - RNA, 22 nt, synthetic construct
  source 1..22: mol_type = other RNA
taaaggcaggtggttacccaca

SEQ ID NO: 6544 - RNA, 22 nt, synthetic construct
  source 1..22: mol_type = other RNA
taaagggaaacagattgttata

SEQ ID NO: 6545 - RNA, 22 nt, synthetic construct
  source 1..22: mol_type = other RNA
taaatagtcctcaggacagtga

SEQ ID NO: 6546 - RNA, 22 nt, synthetic construct
  source 1..22: mol_type = other RNA
taaattgtagagccaggacctg

SEQ ID NO: 6547 - RNA, 22 nt, synthetic construct
  source 1..22: mol_type = other RNA
taacaatctgtttccctttatc

SEQ ID NO: 6548 - RNA, 22 nt, synthetic construct
  source 1..22: mol_type = other RNA
taacacatgactatattagagt

SEQ ID NO: 6549 - RNA, 22 nt, synthetic construct
  source 1..22: mol_type = other RNA
taacaggagatttgaatggggt

SEQ ID NO: 6550 - RNA, 22 nt, synthetic construct
  source 1..22: mol_type = other RNA
taacaggctgtacaggtttgta

SEQ ID NO: 6551 - RNA, 22 nt, synthetic construct
  source 1..22: mol_type = other RNA
taacagtgtgactgggcagatc

SEQ ID NO: 6552 - RNA, 22 nt, synthetic construct
  source 1..22: mol_type = other RNA
taacatgataaccctcactatg

SEQ ID NO: 6553 - RNA, 22 nt, synthetic construct
  source 1..22: mol_type = other RNA
taacattttagcagggaaagaa

SEQ ID NO: 6554 - RNA, 22 nt, synthetic construct
  source 1..22: mol_type = other RNA
taaccacctgcctttatcctgc

SEQ ID NO: 6555 - RNA, 22 nt, synthetic construct
  source 1..22: mol_type = other RNA
taaccctcactatgtggagaac

SEQ ID NO: 6556 - RNA, 22 nt, synthetic construct
  source 1..22: mol_type = other RNA
taactacaaggagctccagaag

SEQ ID NO: 6557 - RNA, 22 nt, synthetic construct
  source 1..22: mol_type = other RNA
taactcctctcttctgtctgaa

SEQ ID NO: 6558 - RNA, 22 nt, synthetic construct
  source 1..22: mol_type = other RNA
taagaggcaaacacagtcccca

SEQ ID NO: 6559 - RNA, 22 nt, synthetic construct
  source 1..22: mol_type = other RNA
taagcatttctcagaacatgtc

SEQ ID NO: 6560 - RNA, 22 nt, synthetic construct
  source 1..22: mol_type = other RNA
taagtttttgaccttgagaaaa

SEQ ID NO: 6561 - RNA, 22 nt, synthetic construct
  source 1..22: mol_type = other RNA
taatagatgtaactacaaggag

SEQ ID NO: 6562 - RNA, 22 nt, synthetic construct
  source 1..22: mol_type = other RNA
taatatggccatacctggggcc

SEQ ID NO: 6563 - RNA, 22 nt, synthetic construct
  source 1..22: mol_type = other RNA
taatgacggggacatgttctga

SEQ ID NO: 6564 - RNA, 22 nt, synthetic construct
  source 1..22: mol_type = other RNA
taatgtgggtaaccacctgcct

SEQ ID NO: 6565 - RNA, 22 nt, synthetic construct
  source 1..22: mol_type = other RNA
tacaaaggaaaagagtggttca

SEQ ID NO: 6566 - RNA, 22 nt, synthetic construct
  source 1..22: mol_type = other RNA
tacaacacctaggtttgtgtaa

SEQ ID NO: 6567 - RNA, 22 nt, synthetic construct
  source 1..22: mol_type = other RNA
tacaaggagctccagaagcaag

SEQ ID NO: 6568 - RNA, 22 nt, synthetic construct
  source 1..22: mol_type = other RNA
tacaatttactaacagtgtgac

SEQ ID NO: 6569 - RNA, 22 nt, synthetic construct
  source 1..22: mol_type = other RNA
tacacaaacctaggtgttgtag

SEQ ID NO: 6570 - RNA, 22 nt, synthetic construct
  source 1..22: mol_type = other RNA
tacaccttcttcatgccactcc

SEQ ID NO: 6571 - RNA, 22 nt, synthetic construct
  source 1..22: mol_type = other RNA
tacacgcataggctacatggta

SEQ ID NO: 6572 - RNA, 22 nt, synthetic construct
  source 1..22: mol_type = other RNA
tacagagagggcaaaggaactg

SEQ ID NO: 6573 - RNA, 22 nt, synthetic construct
  source 1..22: mol_type = other RNA
tacagcctgttactgtactgaa

SEQ ID NO: 6574 - RNA, 22 nt, synthetic construct
  source 1..22: mol_type = other RNA
tacagctctgcagacatcccat

SEQ ID NO: 6575 - RNA, 22 nt, synthetic construct
  source 1..22: mol_type = other RNA
tacaggaatgggatgtctgcag

SEQ ID NO: 6576 - RNA, 22 nt, synthetic construct
  source 1..22: mol_type = other RNA
tacagggtcatgttcccttctc

SEQ ID NO: 6577 - RNA, 22 nt, synthetic construct
  source 1..22: mol_type = other RNA
tacagtaacaggctgtacaggt

SEQ ID NO: 6578 - RNA, 22 nt, synthetic construct
  source 1..22: mol_type = other RNA
tacatggtatagcctattgctc

SEQ ID NO: 6579 - RNA, 22 nt, synthetic construct
  source 1..22: mol_type = other RNA
tacattgatgctgaaaccccat

SEQ ID NO: 6580 - RNA, 22 nt, synthetic construct
  source 1..22: mol_type = other RNA
taccatactggcagttcctttg

SEQ ID NO: 6581 - RNA, 22 nt, synthetic construct
  source 1..22: mol_type = other RNA
taccatgtagcctatgcgtgta

SEQ ID NO: 6582 - RNA, 22 nt, synthetic construct
  source 1..22: mol_type = other RNA
tacccacattacctgcaaggct

SEQ ID NO: 6583 - RNA, 22 nt, synthetic construct
  source 1..22: mol_type = other RNA
taccctgggcagtagaatttca

SEQ ID NO: 6584 - RNA, 22 nt, synthetic construct
  source 1..22: mol_type = other RNA
tacctgcaaggctttgatcttt

SEQ ID NO: 6585 - RNA, 22 nt, synthetic construct
  source 1..22: mol_type = other RNA
tacctggggccatacaccttct

SEQ ID NO: 6586 - RNA, 22 nt, synthetic construct
  source 1..22: mol_type = other RNA
tactaacagtgtgactgggcag

SEQ ID NO: 6587 - RNA, 22 nt, synthetic construct
  source 1..22: mol_type = other RNA
tactacacgcataggctacatg

SEQ ID NO: 6588 - RNA, 22 nt, synthetic construct
  source 1..22: mol_type = other RNA
tactctgtcaatgttctccaca

SEQ ID NO: 6589 - RNA, 22 nt, synthetic construct
  source 1..22: mol_type = other RNA
tactgaccctctacagagaggg

SEQ ID NO: 6590 - RNA, 22 nt, synthetic construct
  source 1..22: mol_type = other RNA
tactgcccagggtacattgatg

SEQ ID NO: 6591 - RNA, 22 nt, synthetic construct
  source 1..22: mol_type = other RNA
tactggcagttcctttgccctc

SEQ ID NO: 6592 - RNA, 22 nt, synthetic construct
  source 1..22: mol_type = other RNA
tacttaatgacggggacatgtt

SEQ ID NO: 6593 - RNA, 22 nt, synthetic construct
  source 1..22: mol_type = other RNA
tagaacagggaattgatttggg

SEQ ID NO: 6594 - RNA, 22 nt, synthetic construct
  source 1..22: mol_type = other RNA
tagaatataacaggagatttga

SEQ ID NO: 6595 - RNA, 22 nt, synthetic construct
  source 1..22: mol_type = other RNA
tagaatttcattgaaaagcctt

SEQ ID NO: 6596 - RNA, 22 nt, synthetic construct
  source 1..22: mol_type = other RNA
tagacagctctaacatgataac

SEQ ID NO: 6597 - RNA, 22 nt, synthetic construct
  source 1..22: mol_type = other RNA
tagactacaaacctgtacagcc

SEQ ID NO: 6598 - RNA, 22 nt, synthetic construct
  source 1..22: mol_type = other RNA
tagagccaggacctgaactcta

SEQ ID NO: 6599 - RNA, 22 nt, synthetic construct
  source 1..22: mol_type = other RNA
tagagctgtctataaatagtcc

SEQ ID NO: 6600 - RNA, 22 nt, synthetic construct
  source 1..22: mol_type = other RNA
tagaggagataaagggaaacag

SEQ ID NO: 6601 - RNA, 22 nt, synthetic construct
  source 1..22: mol_type = other RNA
tagagggtcagtaatatggcca

SEQ ID NO: 6602 - RNA, 22 nt, synthetic construct
  source 1..22: mol_type = other RNA
tagaggttcccaggccactaga

SEQ ID NO: 6603 - RNA, 22 nt, synthetic construct
  source 1..22: mol_type = other RNA
tagagttcaggtcctggctcta

SEQ ID NO: 6604 - RNA, 22 nt, synthetic construct
  source 1..22: mol_type = other RNA
tagatgtaactacaaggagctc

SEQ ID NO: 6605 - RNA, 22 nt, synthetic construct
  source 1..22: mol_type = other RNA
tagcagggaaagaagaatccta

SEQ ID NO: 6606 - RNA, 22 nt, synthetic construct
  source 1..22: mol_type = other RNA
tagcctactacacgcataggct

SEQ ID NO: 6607 - RNA, 22 nt, synthetic construct
  source 1..22: mol_type = other RNA
tagcctatgcgtgtagtaggct

SEQ ID NO: 6608 - RNA, 22 nt, synthetic construct
  source 1..22: mol_type = other RNA
taggattcttctttccctgcta

SEQ ID NO: 6609 - RNA, 22 nt, synthetic construct
  source 1..22: mol_type = other RNA
taggctacaacacctaggtttg

SEQ ID NO: 6610 - RNA, 22 nt, synthetic construct
  source 1..22: mol_type = other RNA
taggctataccatgtagcctat

SEQ ID NO: 6611 - RNA, 22 nt, synthetic construct
  source 1..22: mol_type = other RNA
taggtgttgtagcctactacac

SEQ ID NO: 6612 - RNA, 22 nt, synthetic construct
  source 1..22: mol_type = other RNA
taggtttgtgtaagcatttctc

SEQ ID NO: 6613 - RNA, 22 nt, synthetic construct
  source 1..22: mol_type = other RNA
tagtaaattgtagagccaggac

SEQ ID NO: 6614 - RNA, 22 nt, synthetic construct
  source 1..22: mol_type = other RNA
tagtaggctacaacacctaggt

SEQ ID NO: 6615 - RNA, 22 nt, synthetic construct
  source 1..22: mol_type = other RNA
tagtcatgtgttacttaatgac

SEQ ID NO: 6616 - RNA, 22 nt, synthetic construct
  source 1..22: mol_type = other RNA
tagtcctcaggacagtgaaaca

SEQ ID NO: 6617 - RNA, 22 nt, synthetic construct
  source 1..22: mol_type = other RNA
tagtctaggagcaataggctat

SEQ ID NO: 6618 - RNA, 22 nt, synthetic construct
  source 1..22: mol_type = other RNA
tagtgagggttatcatgttaga

SEQ ID NO: 6619 - RNA, 22 nt, synthetic construct
  source 1..22: mol_type = other RNA
tagtggcctgggaacctctaag

SEQ ID NO: 6620 - RNA, 22 nt, synthetic construct
  source 1..22: mol_type = other RNA
tagttggagtccaaaggctttt

SEQ ID NO: 6621 - RNA, 22 nt, synthetic construct
  source 1..22: mol_type = other RNA
tataaatagtcctcaggacagt

SEQ ID NO: 6622 - RNA, 22 nt, synthetic construct
  source 1..22: mol_type = other RNA
tataacaatctgtttcccttta

SEQ ID NO: 6623 - RNA, 22 nt, synthetic construct
  source 1..22: mol_type = other RNA
tataacaggagatttgaatggg

SEQ ID NO: 6624 - RNA, 22 nt, synthetic construct
  source 1..22: mol_type = other RNA
tataactcctctcttctgtctg

SEQ ID NO: 6625 - RNA, 22 nt, synthetic construct
  source 1..22: mol_type = other RNA
tataatagatgtaactacaagg

SEQ ID NO: 6626 - RNA, 22 nt, synthetic construct
  source 1..22: mol_type = other RNA
tatacaaaggaaaagagtggtt

SEQ ID NO: 6627 - RNA, 22 nt, synthetic construct
  source 1..22: mol_type = other RNA
tatacagctctgcagacatccc

SEQ ID NO: 6628 - RNA, 22 nt, synthetic construct
  source 1..22: mol_type = other RNA
tataccatgtagcctatgcgtg

SEQ ID NO: 6629 - RNA, 22 nt, synthetic construct
  source 1..22: mol_type = other RNA
tatagacagctctaacatgata

SEQ ID NO: 6630 - RNA, 22 nt, synthetic construct
  source 1..22: mol_type = other RNA
tatagtcatgtgttacttaatg

SEQ ID NO: 6631 - RNA, 22 nt, synthetic construct
  source 1..22: mol_type = other RNA
tatattagagttcaggtcctgg

SEQ ID NO: 6632 - RNA, 22 nt, synthetic construct
  source 1..22: mol_type = other RNA
tatattctagaacagggaattg

SEQ ID NO: 6633 - RNA, 22 nt, synthetic construct
  source 1..22: mol_type = other RNA
tatcatgttagagctgtctata

SEQ ID NO: 6634 - RNA, 22 nt, synthetic construct
  source 1..22: mol_type = other RNA
tatcctgcaataccatactggc

SEQ ID NO: 6635 - RNA, 22 nt, synthetic construct
  source 1..22: mol_type = other RNA
tatctcctctagtggcctggga

SEQ ID NO: 6636 - RNA, 22 nt, synthetic construct
  source 1..22: mol_type = other RNA
tatgcgtgtagtaggctacaac

SEQ ID NO: 6637 - RNA, 22 nt, synthetic construct
  source 1..22: mol_type = other RNA
tatggccatacctggggccata

SEQ ID NO: 6638 - RNA, 22 nt, synthetic construct
  source 1..22: mol_type = other RNA
tatggccatattactgaccctc

SEQ ID NO: 6639 - RNA, 22 nt, synthetic construct
  source 1..22: mol_type = other RNA
tatggccccaggtatggccata

SEQ ID NO: 6640 - RNA, 22 nt, synthetic construct
  source 1..22: mol_type = other RNA
tatggggactgtgtttgcctct

SEQ ID NO: 6641 - RNA, 22 nt, synthetic construct
  source 1..22: mol_type = other RNA
tatggtattgcaggataaaggc

SEQ ID NO: 6642 - RNA, 22 nt, synthetic construct
  source 1..22: mol_type = other RNA
tatgtggagaacattgacagag

SEQ ID NO: 6643 - RNA, 22 nt, synthetic construct
  source 1..22: mol_type = other RNA
tattactgaccctctacagaga

SEQ ID NO: 6644 - RNA, 22 nt, synthetic construct
  source 1..22: mol_type = other RNA
tattagagttcaggtcctggct

SEQ ID NO: 6645 - RNA, 22 nt, synthetic construct
  source 1..22: mol_type = other RNA
tattctagaacagggaattgat

SEQ ID NO: 6646 - RNA, 22 nt, synthetic construct
  source 1..22: mol_type = other RNA
tattcttcagacagaagagagg

SEQ ID NO: 6647 - RNA, 22 nt, synthetic construct
  source 1..22: mol_type = other RNA
tattgcaggataaaggcaggtg

SEQ ID NO: 6648 - RNA, 22 nt, synthetic construct
  source 1..22: mol_type = other RNA
tatttatagacagctctaacat

SEQ ID NO: 6649 - RNA, 22 nt, synthetic construct
  source 1..22: mol_type = other RNA
tcaaagccttgcaggtaatgtg

SEQ ID NO: 6650 - RNA, 22 nt, synthetic construct
  source 1..22: mol_type = other RNA
tcaaatctcctgttatattcta

SEQ ID NO: 6651 - RNA, 22 nt, synthetic construct
  source 1..22: mol_type = other RNA
tcaagttataacaatctgtttc

SEQ ID NO: 6652 - RNA, 22 nt, synthetic construct
  source 1..22: mol_type = other RNA
tcaatgaaattctactgcccag

SEQ ID NO: 6653 - RNA, 22 nt, synthetic construct
  source 1..22: mol_type = other RNA
tcaatgtaccctgggcagtaga

SEQ ID NO: 6654 - RNA, 22 nt, synthetic construct
  source 1..22: mol_type = other RNA
tcaatgttctccacatagtgag

SEQ ID NO: 6655 - RNA, 22 nt, synthetic construct
  source 1..22: mol_type = other RNA
tcaattccctgttctagaatat

SEQ ID NO: 6656 - RNA, 22 nt, synthetic construct
  source 1..22: mol_type = other RNA
tcacactgttagtaaattgtag

SEQ ID NO: 6657 - RNA, 22 nt, synthetic construct
  source 1..22: mol_type = other RNA
tcactatgtggagaacattgac

SEQ ID NO: 6658 - RNA, 22 nt, synthetic construct
  source 1..22: mol_type = other RNA
tcactgtcctgaggactattta

SEQ ID NO: 6659 - RNA, 22 nt, synthetic construct
  source 1..22: mol_type = other RNA
tcagaacatgtccccgtcatta

SEQ ID NO: 6660 - RNA, 22 nt, synthetic construct
  source 1..22: mol_type = other RNA
tcagacagaagagaggagttat

SEQ ID NO: 6661 - RNA, 22 nt, synthetic construct
  source 1..22: mol_type = other RNA
tcagcagagatgtccaatgtgg

SEQ ID NO: 6662 - RNA, 22 nt, synthetic construct
  source 1..22: mol_type = other RNA
tcagcatcaatgtaccctgggc

SEQ ID NO: 6663 - RNA, 22 nt, synthetic construct
  source 1..22: mol_type = other RNA
tcaggaaggtggatgatctgcc

SEQ ID NO: 6664 - RNA, 22 nt, synthetic construct
  source 1..22: mol_type = other RNA
tcaggacagtgaaacaaaaaca

SEQ ID NO: 6665 - RNA, 22 nt, synthetic construct
  source 1..22: mol_type = other RNA
tcaggtcctggctctacaattt

SEQ ID NO: 6666 - RNA, 22 nt, synthetic construct
  source 1..22: mol_type = other RNA
tcagtaatatggccatacctgg

SEQ ID NO: 6667 - RNA, 22 nt, synthetic construct
  source 1..22: mol_type = other RNA
tcatccaccttcctgatgctct

SEQ ID NO: 6668 - RNA, 22 nt, synthetic construct
  source 1..22: mol_type = other RNA
tcatgccactccacaggagaag

SEQ ID NO: 6669 - RNA, 22 nt, synthetic construct
  source 1..22: mol_type = other RNA
tcatgtgttacttaatgacggg

SEQ ID NO: 6670 - RNA, 22 nt, synthetic construct
  source 1..22: mol_type = other RNA
tcatgttagagctgtctataaa

SEQ ID NO: 6671 - RNA, 22 nt, synthetic construct
  source 1..22: mol_type = other RNA
tcatgttcccttctcctgtgga

SEQ ID NO: 6672 - RNA, 22 nt, synthetic construct
  source 1..22: mol_type = other RNA
tcattaagtaacacatgactat

SEQ ID NO: 6673 - RNA, 22 nt, synthetic construct
  source 1..22: mol_type = other RNA
tcattgaaaagcctttggactc

SEQ ID NO: 6674 - RNA, 22 nt, synthetic construct
  source 1..22: mol_type = other RNA
tcattttctctcctcagcagag

SEQ ID NO: 6675 - RNA, 22 nt, synthetic construct
  source 1..22: mol_type = other RNA
tccaaaggcttttcaatgaaat

SEQ ID NO: 6676 - RNA, 22 nt, synthetic construct
  source 1..22: mol_type = other RNA
tccaactaaagatgcagagaag

SEQ ID NO: 6677 - RNA, 22 nt, synthetic construct
  source 1..22: mol_type = other RNA
tccaagttcctccctctctctt

SEQ ID NO: 6678 - RNA, 22 nt, synthetic construct
  source 1..22: mol_type = other RNA
tccaatgtggaaatggcagaag

SEQ ID NO: 6679 - RNA, 22 nt, synthetic construct
  source 1..22: mol_type = other RNA
tccacaggagaagggaacatga

SEQ ID NO: 6680 - RNA, 22 nt, synthetic construct
  source 1..22: mol_type = other RNA
tccacatagtgagggttatcat

SEQ ID NO: 6681 - RNA, 22 nt, synthetic construct
  source 1..22: mol_type = other RNA
tccacattggacatctctgctg

SEQ ID NO: 6682 - RNA, 22 nt, synthetic construct
  source 1..22: mol_type = other RNA
tccaccttcctgatgctctccc

SEQ ID NO: 6683 - RNA, 22 nt, synthetic construct
  source 1..22: mol_type = other RNA
tccagaagcaagagagagggag

SEQ ID NO: 6684 - RNA, 22 nt, synthetic construct
  source 1..22: mol_type = other RNA
tcccaaatcaattccctgttct

SEQ ID NO: 6685 - RNA, 22 nt, synthetic construct
  source 1..22: mol_type = other RNA
tcccaggccactagaggagata

SEQ ID NO: 6686 - RNA, 22 nt, synthetic construct
  source 1..22: mol_type = other RNA
tcccattcctgtatggggactg

SEQ ID NO: 6687 - RNA, 22 nt, synthetic construct
  source 1..22: mol_type = other RNA
tccccatacaggaatgggatgt

SEQ ID NO: 6688 - RNA, 22 nt, synthetic construct
  source 1..22: mol_type = other RNA
tccccgtcattaagtaacacat

SEQ ID NO: 6689 - RNA, 22 nt, synthetic construct
  source 1..22: mol_type = other RNA
tccctctctcttgcttctggag

SEQ ID NO: 6690 - RNA, 22 nt, synthetic construct
  source 1..22: mol_type = other RNA
tccctgctaaaatgttactctg

SEQ ID NO: 6691 - RNA, 22 nt, synthetic construct
  source 1..22: mol_type = other RNA
tccctgttctagaatataacag

SEQ ID NO: 6692 - RNA, 22 nt, synthetic construct
  source 1..22: mol_type = other RNA
tcccttctcctgtggagtggca

SEQ ID NO: 6693 - RNA, 22 nt, synthetic construct
  source 1..22: mol_type = other RNA
tccctttatctcctctagtggc

SEQ ID NO: 6694 - RNA, 22 nt, synthetic construct
  source 1..22: mol_type = other RNA
tcctacagggtcatgttccctt

SEQ ID NO: 6695 - RNA, 22 nt, synthetic construct
  source 1..22: mol_type = other RNA
tcctagactacaaacctgtaca

SEQ ID NO: 6696 - RNA, 22 nt, synthetic construct
  source 1..22: mol_type = other RNA
tcctcagcagagatgtccaatg

SEQ ID NO: 6697 - RNA, 22 nt, synthetic construct
  source 1..22: mol_type = other RNA
tcctcaggacagtgaaacaaaa

SEQ ID NO: 6698 - RNA, 22 nt, synthetic construct
  source 1..22: mol_type = other RNA
tcctccctctctcttgcttctg

SEQ ID NO: 6699 - RNA, 22 nt, synthetic construct
  source 1..22: mol_type = other RNA
tcctctagtggcctgggaacct

SEQ ID NO: 6700 - RNA, 22 nt, synthetic construct
  source 1..22: mol_type = other RNA
tcctctcttctgtctgaagaat

SEQ ID NO: 6701 - RNA, 22 nt, synthetic construct
  source 1..22: mol_type = other RNA
tcctgaggactatttatagaca

SEQ ID NO: 6702 - RNA, 22 nt, synthetic construct
  source 1..22: mol_type = other RNA
tcctgatgctctcccaaatcaa

SEQ ID NO: 6703 - RNA, 22 nt, synthetic construct
  source 1..22: mol_type = other RNA
tcctgcaataccatactggcag

SEQ ID NO: 6704 - RNA, 22 nt, synthetic construct
  source 1..22: mol_type = other RNA
tcctggctctacaatttactaa

SEQ ID NO: 6705 - RNA, 22 nt, synthetic construct
  source 1..22: mol_type = other RNA
tcctgtatggggactgtgtttg

SEQ ID NO: 6706 - RNA, 22 nt, synthetic construct
  source 1..22: mol_type = other RNA
tcctgtggagtggcatgaagaa

SEQ ID NO: 6707 - RNA, 22 nt, synthetic construct
  source 1..22: mol_type = other RNA
tcctgttatattctagaacagg

SEQ ID NO: 6708 - RNA, 22 nt, synthetic construct
  source 1..22: mol_type = other RNA
tccttgtagttacatctattat

SEQ ID NO: 6709 - RNA, 22 nt, synthetic construct
  source 1..22: mol_type = other RNA
tcctttgccctctctgtagagg

SEQ ID NO: 6710 - RNA, 22 nt, synthetic construct
  source 1..22: mol_type = other RNA
tctaacatgataaccctcacta

SEQ ID NO: 6711 - RNA, 22 nt, synthetic construct
  source 1..22: mol_type = other RNA
tctaagaggcaaacacagtccc

SEQ ID NO: 6712 - RNA, 22 nt, synthetic construct
  source 1..22: mol_type = other RNA
tctaatatagtcatgtgttact

SEQ ID NO: 6713 - RNA, 22 nt, synthetic construct
  source 1..22: mol_type = other RNA
tctacaatttactaacagtgtg

SEQ ID NO: 6714 - RNA, 22 nt, synthetic construct
  source 1..22: mol_type = other RNA
tctacagagagggcaaaggaac

SEQ ID NO: 6715 - RNA, 22 nt, synthetic construct
  source 1..22: mol_type = other RNA
tctactgcccagggtacattga

SEQ ID NO: 6716 - RNA, 22 nt, synthetic construct
  source 1..22: mol_type = other RNA
tctagaacagggaattgatttg

SEQ ID NO: 6717 - RNA, 22 nt, synthetic construct
  source 1..22: mol_type = other RNA
tctagaatataacaggagattt

SEQ ID NO: 6718 - RNA, 22 nt, synthetic construct
  source 1..22: mol_type = other RNA
tctaggagcaataggctatacc

SEQ ID NO: 6719 - RNA, 22 nt, synthetic construct
  source 1..22: mol_type = other RNA
tctagtggcctgggaacctcta

SEQ ID NO: 6720 - RNA, 22 nt, synthetic construct
  source 1..22: mol_type = other RNA
tctataaatagtcctcaggaca

SEQ ID NO: 6721 - RNA, 22 nt, synthetic construct
  source 1..22: mol_type = other RNA
tctcagaacatgtccccgtcat

SEQ ID NO: 6722 - RNA, 22 nt, synthetic construct
  source 1..22: mol_type = other RNA
tctccacatagtgagggttatc

SEQ ID NO: 6723 - RNA, 22 nt, synthetic construct
  source 1..22: mol_type = other RNA
tctcccaaatcaattccctgtt

SEQ ID NO: 6724 - RNA, 22 nt, synthetic construct
  source 1..22: mol_type = other RNA
tctcctcagcagagatgtccaa

SEQ ID NO: 6725 - RNA, 22 nt, synthetic construct
  source 1..22: mol_type = other RNA
tctcctctagtggcctgggaac

SEQ ID NO: 6726 - RNA, 22 nt, synthetic construct
  source 1..22: mol_type = other RNA
tctcctgtggagtggcatgaag

SEQ ID NO: 6727 - RNA, 22 nt, synthetic construct
  source 1..22: mol_type = other RNA
tctcctgttatattctagaaca

SEQ ID NO: 6728 - RNA, 22 nt, synthetic construct
  source 1..22: mol_type = other RNA
tctctcctcagcagagatgtcc

SEQ ID NO: 6729 - RNA, 22 nt, synthetic construct
  source 1..22: mol_type = other RNA
tctctcttgcttctggagctcc

SEQ ID NO: 6730 - RNA, 22 nt, synthetic construct
  source 1..22: mol_type = other RNA
tctctgcatctttagttggagt

SEQ ID NO: 6731 - RNA, 22 nt, synthetic construct
  source 1..22: mol_type = other RNA
tctctgctgaggagagaaaatg

SEQ ID NO: 6732 - RNA, 22 nt, synthetic construct
  source 1..22: mol_type = other RNA
tctctgtagagggtcagtaata

SEQ ID NO: 6733 - RNA, 22 nt, synthetic construct
  source 1..22: mol_type = other RNA
tctcttctgtctgaagaataaa

SEQ ID NO: 6734 - RNA, 22 nt, synthetic construct
  source 1..22: mol_type = other RNA
tctcttgcttctggagctcctt

SEQ ID NO: 6735 - RNA, 22 nt, synthetic construct
  source 1..22: mol_type = other RNA
tctgagaaatgcttacacaaac

SEQ ID NO: 6736 - RNA, 22 nt, synthetic construct
  source 1..22: mol_type = other RNA
tctgcagacatcccattcctgt

SEQ ID NO: 6737 - RNA, 22 nt, synthetic construct
  source 1..22: mol_type = other RNA
tctgcagagctgtataactcct

SEQ ID NO: 6738 - RNA, 22 nt, synthetic construct
  source 1..22: mol_type = other RNA
tctgcatctttagttggagtcc

SEQ ID NO: 6739 - RNA, 22 nt, synthetic construct
  source 1..22: mol_type = other RNA
tctgccatttccacattggaca

SEQ ID NO: 6740 - RNA, 22 nt, synthetic construct
  source 1..22: mol_type = other RNA
tctgcccagtcacactgttagt

SEQ ID NO: 6741 - RNA, 22 nt, synthetic construct
  source 1..22: mol_type = other RNA
tctgctgaggagagaaaatgaa

SEQ ID NO: 6742 - RNA, 22 nt, synthetic construct
  source 1..22: mol_type = other RNA
tctggagctccttgtagttaca

SEQ ID NO: 6743 - RNA, 22 nt, synthetic construct
  source 1..22: mol_type = other RNA
tctgtagagggtcagtaatatg

SEQ ID NO: 6744 - RNA, 22 nt, synthetic construct
  source 1..22: mol_type = other RNA
tctgtcaatgttctccacatag

SEQ ID NO: 6745 - RNA, 22 nt, synthetic construct
  source 1..22: mol_type = other RNA
tctgtctgaagaataaaacaac

SEQ ID NO: 6746 - RNA, 22 nt, synthetic construct
  source 1..22: mol_type = other RNA
tctgtttccctttatctcctct

SEQ ID NO: 6747 - RNA, 22 nt, synthetic construct
  source 1..22: mol_type = other RNA
tcttagaggttcccaggccact

SEQ ID NO: 6748 - RNA, 22 nt, synthetic construct
  source 1..22: mol_type = other RNA
tcttcagacagaagagaggagt

SEQ ID NO: 6749 - RNA, 22 nt, synthetic construct
  source 1..22: mol_type = other RNA
tcttcatgccactccacaggag

SEQ ID NO: 6750 - RNA, 22 nt, synthetic construct
  source 1..22: mol_type = other RNA
tcttctgccatttccacattgg

SEQ ID NO: 6751 - RNA, 22 nt, synthetic construct
  source 1..22: mol_type = other RNA
tcttctgtctgaagaataaaac

SEQ ID NO: 6752 - RNA, 22 nt, synthetic construct
  source 1..22: mol_type = other RNA
tcttctttccctgctaaaatgt

SEQ ID NO: 6753 - RNA, 22 nt, synthetic construct
  source 1..22: mol_type = other RNA
tcttgcttctggagctccttgt

SEQ ID NO: 6754 - RNA, 22 nt, synthetic construct
  source 1..22: mol_type = other RNA
tctttagttggagtccaaaggc

SEQ ID NO: 6755 - RNA, 22 nt, synthetic construct
  source 1..22: mol_type = other RNA
tctttccctgctaaaatgttac

SEQ ID NO: 6756 - RNA, 22 nt, synthetic construct
  source 1..22: mol_type = other RNA
tctttcttctgccatttccaca

SEQ ID NO: 6757 - RNA, 22 nt, synthetic construct
  source 1..22: mol_type = other RNA
tcttttcctttgtataatgttg

SEQ ID NO: 6758 - RNA, 22 nt, synthetic construct
  source 1..22: mol_type = other RNA
tgaaaagcctttggactccaac

SEQ ID NO: 6759 - RNA, 22 nt, synthetic construct
  source 1..22: mol_type = other RNA
tgaaaccccattcaaatctcct

SEQ ID NO: 6760 - RNA, 22 nt, synthetic construct
  source 1..22: mol_type = other RNA
tgaaattctactgcccagggta

SEQ ID NO: 6761 - RNA, 22 nt, synthetic construct
  source 1..22: mol_type = other RNA
tgaaccactcttttcctttgta

SEQ ID NO: 6762 - RNA, 22 nt, synthetic construct
  source 1..22: mol_type = other RNA
tgaactctaatatagtcatgtg

SEQ ID NO: 6763 - RNA, 22 nt, synthetic construct
  source 1..22: mol_type = other RNA
tgaagaaggtgtatggccccag

SEQ ID NO: 6764 - RNA, 22 nt, synthetic construct
  source 1..22: mol_type = other RNA
tgaatggggtttcagcatcaat

SEQ ID NO: 6765 - RNA, 22 nt, synthetic construct
  source 1..22: mol_type = other RNA
tgacagagtaacattttagcag

SEQ ID NO: 6766 - RNA, 22 nt, synthetic construct
  source 1..22: mol_type = other RNA
tgaccctctacagagagggcaa

SEQ ID NO: 6767 - RNA, 22 nt, synthetic construct
  source 1..22: mol_type = other RNA
tgaccctgtaggattcttcttt

SEQ ID NO: 6768 - RNA, 22 nt, synthetic construct
  source 1..22: mol_type = other RNA
tgaccttgagaaaatgtttttg

SEQ ID NO: 6769 - RNA, 22 nt, synthetic construct
  source 1..22: mol_type = other RNA
tgacggggacatgttctgagaa

SEQ ID NO: 6770 - RNA, 22 nt, synthetic construct
  source 1..22: mol_type = other RNA
tgactatattagagttcaggtc

SEQ ID NO: 6771 - RNA, 22 nt, synthetic construct
  source 1..22: mol_type = other RNA
tgactgggcagatcatccacct

SEQ ID NO: 6772 - RNA, 22 nt, synthetic construct
  source 1..22: mol_type = other RNA
tgagaaaatgtttttgtttcac

SEQ ID NO: 6773 - RNA, 22 nt, synthetic construct
  source 1..22: mol_type = other RNA
tgagaaatgcttacacaaacct

SEQ ID NO: 6774 - RNA, 22 nt, synthetic construct
  source 1..22: mol_type = other RNA
tgaggactatttatagacagct

SEQ ID NO: 6775 - RNA, 22 nt, synthetic construct
  source 1..22: mol_type = other RNA
tgaggagagaaaatgaaccact

SEQ ID NO: 6776 - RNA, 22 nt, synthetic construct
  source 1..22: mol_type = other RNA
tgagggttatcatgttagagct

SEQ ID NO: 6777 - RNA, 22 nt, synthetic construct
  source 1..22: mol_type = other RNA
tgataaccctcactatgtggag

SEQ ID NO: 6778 - RNA, 22 nt, synthetic construct
  source 1..22: mol_type = other RNA
tgatctgcccagtcacactgtt

SEQ ID NO: 6779 - RNA, 22 nt, synthetic construct
  source 1..22: mol_type = other RNA
tgatctttcttctgccatttcc

SEQ ID NO: 6780 - RNA, 22 nt, synthetic construct
  source 1..22: mol_type = other RNA
tgatgctctcccaaatcaattc

SEQ ID NO: 6781 - RNA, 22 nt, synthetic construct
  source 1..22: mol_type = other RNA
tgatgctgaaaccccattcaaa

SEQ ID NO: 6782 - RNA, 22 nt, synthetic construct
  source 1..22: mol_type = other RNA
tgatttgggagagcatcaggaa

SEQ ID NO: 6783 - RNA, 22 nt, synthetic construct
  source 1..22: mol_type = other RNA
tgcaaggctttgatctttcttc

SEQ ID NO: 6784 - RNA, 22 nt, synthetic construct
  source 1..22: mol_type = other RNA
tgcaataccatactggcagttc

SEQ ID NO: 6785 - RNA, 22 nt, synthetic construct
  source 1..22: mol_type = other RNA
tgcagacatcccattcctgtat

SEQ ID NO: 6786 - RNA, 22 nt, synthetic construct
  source 1..22: mol_type = other RNA
tgcagagaagtccaagttcctc

SEQ ID NO: 6787 - RNA, 22 nt, synthetic construct
  source 1..22: mol_type = other RNA
tgcagagctgtataactcctct

SEQ ID NO: 6788 - RNA, 22 nt, synthetic construct
  source 1..22: mol_type = other RNA
tgcaggataaaggcaggtggtt

SEQ ID NO: 6789 - RNA, 22 nt, synthetic construct
  source 1..22: mol_type = other RNA
tgcaggtaatgtgggtaaccac

SEQ ID NO: 6790 - RNA, 22 nt, synthetic construct
  source 1..22: mol_type = other RNA
tgcatctttagttggagtccaa

SEQ ID NO: 6791 - RNA, 22 nt, synthetic construct
  source 1..22: mol_type = other RNA
tgccactccacaggagaaggga

SEQ ID NO: 6792 - RNA, 22 nt, synthetic construct
  source 1..22: mol_type = other RNA
tgccagtatggtattgcaggat

SEQ ID NO: 6793 - RNA, 22 nt, synthetic construct
  source 1..22: mol_type = other RNA
tgccatttccacattggacatc

SEQ ID NO: 6794 - RNA, 22 nt, synthetic construct
  source 1..22: mol_type = other RNA
tgcccacagtattcagtacagt

SEQ ID NO: 6795 - RNA, 22 nt, synthetic construct
  source 1..22: mol_type = other RNA
tgcccagggtacattgatgctg

SEQ ID NO: 6796 - RNA, 22 nt, synthetic construct
  source 1..22: mol_type = other RNA
tgcccagtcacactgttagtaa

SEQ ID NO: 6797 - RNA, 22 nt, synthetic construct
  source 1..22: mol_type = other RNA
tgccctctctgtagagggtcag

SEQ ID NO: 6798 - RNA, 22 nt, synthetic construct
  source 1..22: mol_type = other RNA
tgcctcttagaggttcccaggc

SEQ ID NO: 6799 - RNA, 22 nt, synthetic construct
  source 1..22: mol_type = other RNA
tgcctttatcctgcaataccat

SEQ ID NO: 6800 - RNA, 22 nt, synthetic construct
  source 1..22: mol_type = other RNA
tgcgtgtagtaggctacaacac

SEQ ID NO: 6801 - RNA, 22 nt, synthetic construct
  source 1..22: mol_type = other RNA
tgctaaaatgttactctgtcaa

SEQ ID NO: 6802 - RNA, 22 nt, synthetic construct
  source 1..22: mol_type = other RNA
tgctcctagactacaaacctgt

SEQ ID NO: 6803 - RNA, 22 nt, synthetic construct
  source 1..22: mol_type = other RNA
tgctctcccaaatcaattccct

SEQ ID NO: 6804 - RNA, 22 nt, synthetic construct
  source 1..22: mol_type = other RNA
tgctgaaaccccattcaaatct

SEQ ID NO: 6805 - RNA, 22 nt, synthetic construct
  source 1..22: mol_type = other RNA
tgctgaggagagaaaatgaacc

SEQ ID NO: 6806 - RNA, 22 nt, synthetic construct
  source 1..22: mol_type = other RNA
tgcttacacaaacctaggtgtt

SEQ ID NO: 6807 - RNA, 22 nt, synthetic construct
  source 1..22: mol_type = other RNA
tgcttctggagctccttgtagt

SEQ ID NO: 6808 - RNA, 22 nt, synthetic construct
  source 1..22: mol_type = other RNA
tggaaatggcagaagaaagatc

SEQ ID NO: 6809 - RNA, 22 nt, synthetic construct
  source 1..22: mol_type = other RNA
tggacatctctgctgaggagag

SEQ ID NO: 6810 - RNA, 22 nt, synthetic construct
  source 1..22: mol_type = other RNA
tggactccaactaaagatgcag

SEQ ID NO: 6811 - RNA, 22 nt, synthetic construct
  source 1..22: mol_type = other RNA
tggacttctctgcatctttagt

SEQ ID NO: 6812 - RNA, 22 nt, synthetic construct
  source 1..22: mol_type = other RNA
tggagaacattgacagagtaac

SEQ ID NO: 6813 - RNA, 22 nt, synthetic construct
  source 1..22: mol_type = other RNA
tggagctccttgtagttacatc

SEQ ID NO: 6814 - RNA, 22 nt, synthetic construct
  source 1..22: mol_type = other RNA
tggagtccaaaggcttttcaat

SEQ ID NO: 6815 - RNA, 22 nt, synthetic construct
  source 1..22: mol_type = other RNA
tggagtggcatgaagaaggtgt

SEQ ID NO: 6816 - RNA, 22 nt, synthetic construct
  source 1..22: mol_type = other RNA
tggatgatctgcccagtcacac

SEQ ID NO: 6817 - RNA, 22 nt, synthetic construct
  source 1..22: mol_type = other RNA
tggcagaagaaagatcaaagcc

SEQ ID NO: 6818 - RNA, 22 nt, synthetic construct
  source 1..22: mol_type = other RNA
tggcagttcctttgccctctct

SEQ ID NO: 6819 - RNA, 22 nt, synthetic construct
  source 1..22: mol_type = other RNA
tggcatgaagaaggtgtatggc

SEQ ID NO: 6820 - RNA, 22 nt, synthetic construct
  source 1..22: mol_type = other RNA
tggccatacctggggccataca

SEQ ID NO: 6821 - RNA, 22 nt, synthetic construct
  source 1..22: mol_type = other RNA
tggccatattactgaccctcta

SEQ ID NO: 6822 - RNA, 22 nt, synthetic construct
  source 1..22: mol_type = other RNA
tggccccaggtatggccatatt

SEQ ID NO: 6823 - RNA, 22 nt, synthetic construct
  source 1..22: mol_type = other RNA
tggcctgggaacctctaagagg

SEQ ID NO: 6824 - RNA, 22 nt, synthetic construct
  source 1..22: mol_type = other RNA
tggctctacaatttactaacag

SEQ ID NO: 6825 - RNA, 22 nt, synthetic construct
  source 1..22: mol_type = other RNA
tgggaacctctaagaggcaaac

SEQ ID NO: 6826 - RNA, 22 nt, synthetic construct
  source 1..22: mol_type = other RNA
tgggagagcatcaggaaggtgg

SEQ ID NO: 6827 - RNA, 22 nt, synthetic construct
  source 1..22: mol_type = other RNA
tgggatgtctgcagagctgtat

SEQ ID NO: 6828 - RNA, 22 nt, synthetic construct
  source 1..22: mol_type = other RNA
tgggcagatcatccaccttcct

SEQ ID NO: 6829 - RNA, 22 nt, synthetic construct
  source 1..22: mol_type = other RNA
tgggcagtagaatttcattgaa

SEQ ID NO: 6830 - RNA, 22 nt, synthetic construct
  source 1..22: mol_type = other RNA
tggggactgtgtttgcctctta

SEQ ID NO: 6831 - RNA, 22 nt, synthetic construct
  source 1..22: mol_type = other RNA
tggggccatacaccttcttcat

SEQ ID NO: 6832 - RNA, 22 nt, synthetic construct
  source 1..22: mol_type = other RNA
tggggtttcagcatcaatgtac

SEQ ID NO: 6833 - RNA, 22 nt, synthetic construct
  source 1..22: mol_type = other RNA
tgggtaaccacctgcctttatc

SEQ ID NO: 6834 - RNA, 22 nt, synthetic construct
  source 1..22: mol_type = other RNA
tggtattgcaggataaaggcag

SEQ ID NO: 6835 - RNA, 22 nt, synthetic construct
  source 1..22: mol_type = other RNA
tggttacccacattacctgcaa

SEQ ID NO: 6836 - RNA, 22 nt, synthetic construct
  source 1..22: mol_type = other RNA
tggttcattttctctcctcagc

SEQ ID NO: 6837 - RNA, 22 nt, synthetic construct
  source 1..22: mol_type = other RNA
tgtaactacaaggagctccaga

SEQ ID NO: 6838 - RNA, 22 nt, synthetic construct
  source 1..22: mol_type = other RNA
tgtaagcatttctcagaacatg

SEQ ID NO: 6839 - RNA, 22 nt, synthetic construct
  source 1..22: mol_type = other RNA
tgtaccctgggcagtagaattt

SEQ ID NO: 6840 - RNA, 22 nt, synthetic construct
  source 1..22: mol_type = other RNA
tgtagagccaggacctgaactc

SEQ ID NO: 6841 - RNA, 22 nt, synthetic construct
  source 1..22: mol_type = other RNA
tgtagagggtcagtaatatggc

SEQ ID NO: 6842 - RNA, 22 nt, synthetic construct
  source 1..22: mol_type = other RNA
tgtagcctactacacgcatagg

SEQ ID NO: 6843 - RNA, 22 nt, synthetic construct
  source 1..22: mol_type = other RNA
tgtagcctatgcgtgtagtagg

SEQ ID NO: 6844 - RNA, 22 nt, synthetic construct
  source 1..22: mol_type = other RNA
tgtaggattcttctttccctgc

SEQ ID NO: 6845 - RNA, 22 nt, synthetic construct
  source 1..22: mol_type = other RNA
tgtagtaggctacaacacctag

SEQ ID NO: 6846 - RNA, 22 nt, synthetic construct
  source 1..22: mol_type = other RNA
tgtagtctaggagcaataggct

SEQ ID NO: 6847 - RNA, 22 nt, synthetic construct
  source 1..22: mol_type = other RNA
tgtataactcctctcttctgtc

SEQ ID NO: 6848 - RNA, 22 nt, synthetic construct
  source 1..22: mol_type = other RNA
tgtatggccccaggtatggcca

SEQ ID NO: 6849 - RNA, 22 nt, synthetic construct
  source 1..22: mol_type = other RNA
tgtatggggactgtgtttgcct

SEQ ID NO: 6850 - RNA, 22 nt, synthetic construct
  source 1..22: mol_type = other RNA
tgtcaatgttctccacatagtg

SEQ ID NO: 6851 - RNA, 22 nt, synthetic construct
  source 1..22: mol_type = other RNA
tgtccaatgtggaaatggcaga

SEQ ID NO: 6852 - RNA, 22 nt, synthetic construct
  source 1..22: mol_type = other RNA
tgtccccgtcattaagtaacac

SEQ ID NO: 6853 - RNA, 22 nt, synthetic construct
  source 1..22: mol_type = other RNA
tgtcctgaggactatttataga

SEQ ID NO: 6854 - RNA, 22 nt, synthetic construct
  source 1..22: mol_type = other RNA
tgtctataaatagtcctcagga

SEQ ID NO: 6855 - RNA, 22 nt, synthetic construct
  source 1..22: mol_type = other RNA
tgtctgaagaataaaacaacat

SEQ ID NO: 6856 - RNA, 22 nt, synthetic construct
  source 1..22: mol_type = other RNA
tgtctgcagagctgtataactc

SEQ ID NO: 6857 - RNA, 22 nt, synthetic construct
  source 1..22: mol_type = other RNA
tgtgactgggcagatcatccac

SEQ ID NO: 6858 - RNA, 22 nt, synthetic construct
  source 1..22: mol_type = other RNA
tgtggaaatggcagaagaaaga

SEQ ID NO: 6859 - RNA, 22 nt, synthetic construct
  source 1..22: mol_type = other RNA
tgtggagaacattgacagagta

SEQ ID NO: 6860 - RNA, 22 nt, synthetic construct
  source 1..22: mol_type = other RNA
tgtggagtggcatgaagaaggt

SEQ ID NO: 6861 - RNA, 22 nt, synthetic construct
  source 1..22: mol_type = other RNA
tgtgggtaaccacctgccttta

SEQ ID NO: 6862 - RNA, 22 nt, synthetic construct
  source 1..22: mol_type = other RNA
tgtgtaagcatttctcagaaca

SEQ ID NO: 6863 - RNA, 22 nt, synthetic construct
  source 1..22: mol_type = other RNA
tgtgttacttaatgacggggac

SEQ ID NO: 6864 - RNA, 22 nt, synthetic construct
  source 1..22: mol_type = other RNA
tgtgtttgcctcttagaggttc

SEQ ID NO: 6865 - RNA, 22 nt, synthetic construct
  source 1..22: mol_type = other RNA
tgttactctgtcaatgttctcc

SEQ ID NO: 6866 - RNA, 22 nt, synthetic construct
  source 1..22: mol_type = other RNA
tgttacttaatgacggggacat

SEQ ID NO: 6867 - RNA, 22 nt, synthetic construct
  source 1..22: mol_type = other RNA
tgttagagctgtctataaatag

SEQ ID NO: 6868 - RNA, 22 nt, synthetic construct
  source 1..22: mol_type = other RNA
tgttagtaaattgtagagccag

SEQ ID NO: 6869 - RNA, 22 nt, synthetic construct
  source 1..22: mol_type = other RNA
tgttatattctagaacagggaa

SEQ ID NO: 6870 - RNA, 22 nt, synthetic construct
  source 1..22: mol_type = other RNA
tgttcccttctcctgtggagtg

SEQ ID NO: 6871 - RNA, 22 nt, synthetic construct
  source 1..22: mol_type = other RNA
tgttctagaatataacaggaga

SEQ ID NO: 6872 - RNA, 22 nt, synthetic construct
  source 1..22: mol_type = other RNA
tgttctccacatagtgagggtt

SEQ ID NO: 6873 - RNA, 22 nt, synthetic construct
  source 1..22: mol_type = other RNA
tgttctgagaaatgcttacaca

SEQ ID NO: 6874 - RNA, 22 nt, synthetic construct
  source 1..22: mol_type = other RNA
tgttgtagcctactacacgcat

SEQ ID NO: 6875 - RNA, 22 nt, synthetic construct
  source 1..22: mol_type = other RNA
tgttgttttattcttcagacag

SEQ ID NO: 6876 - RNA, 22 nt, synthetic construct
  source 1..22: mol_type = other RNA
tgtttcactgtcctgaggacta

SEQ ID NO: 6877 - RNA, 22 nt, synthetic construct
  source 1..22: mol_type = other RNA
tgtttccctttatctcctctag

SEQ ID NO: 6878 - RNA, 22 nt, synthetic construct
  source 1..22: mol_type = other RNA
tgtttgcctcttagaggttccc

SEQ ID NO: 6879 - RNA, 22 nt, synthetic construct
  source 1..22: mol_type = other RNA
tgttttattcttcagacagaag

SEQ ID NO: 6880 - RNA, 22 nt, synthetic construct
  source 1..22: mol_type = other RNA
tgtttttgtttcactgtcctga

SEQ ID NO: 6881 - RNA, 22 nt, synthetic construct
  source 1..22: mol_type = other RNA
ttaatgacggggacatgttctg

SEQ ID NO: 6882 - RNA, 22 nt, synthetic construct
  source 1..22: mol_type = other RNA
ttacacaaacctaggtgttgta

SEQ ID NO: 6883 - RNA, 22 nt, synthetic construct
  source 1..22: mol_type = other RNA
ttacccacattacctgcaaggc

SEQ ID NO: 6884 - RNA, 22 nt, synthetic construct
  source 1..22: mol_type = other RNA
ttacctgcaaggctttgatctt

SEQ ID NO: 6885 - RNA, 22 nt, synthetic construct
  source 1..22: mol_type = other RNA
ttactaacagtgtgactgggca

SEQ ID NO: 6886 - RNA, 22 nt, synthetic construct
  source 1..22: mol_type = other RNA
ttactctgtcaatgttctccac

SEQ ID NO: 6887 - RNA, 22 nt, synthetic construct
  source 1..22: mol_type = other RNA
ttactgaccctctacagagagg

SEQ ID NO: 6888 - RNA, 22 nt, synthetic construct
  source 1..22: mol_type = other RNA
ttacttaatgacggggacatgt

SEQ ID NO: 6889 - RNA, 22 nt, synthetic construct
  source 1..22: mol_type = other RNA
ttagagctgtctataaatagtc

SEQ ID NO: 6890 - RNA, 22 nt, synthetic construct
  source 1..22: mol_type = other RNA
ttagaggttcccaggccactag

SEQ ID NO: 6891 - RNA, 22 nt, synthetic construct
  source 1..22: mol_type = other RNA
ttagagttcaggtcctggctct

SEQ ID NO: 6892 - RNA, 22 nt, synthetic construct
  source 1..22: mol_type = other RNA
ttagcagggaaagaagaatcct

SEQ ID NO: 6893 - RNA, 22 nt, synthetic construct
  source 1..22: mol_type = other RNA
ttagtaaattgtagagccagga

SEQ ID NO: 6894 - RNA, 22 nt, synthetic construct
  source 1..22: mol_type = other RNA
ttagttggagtccaaaggcttt

SEQ ID NO: 6895 - RNA, 22 nt, synthetic construct
  source 1..22: mol_type = other RNA
ttataacaatctgtttcccttt

SEQ ID NO: 6896 - RNA, 22 nt, synthetic construct
  source 1..22: mol_type = other RNA
ttatacaaaggaaaagagtggt

SEQ ID NO: 6897 - RNA, 22 nt, synthetic construct
  source 1..22: mol_type = other RNA
ttatacagctctgcagacatcc

SEQ ID NO: 6898 - RNA, 22 nt, synthetic construct
  source 1..22: mol_type = other RNA
ttatagacagctctaacatgat

SEQ ID NO: 6899 - RNA, 22 nt, synthetic construct
  source 1..22: mol_type = other RNA
ttatattctagaacagggaatt

SEQ ID NO: 6900 - RNA, 22 nt, synthetic construct
  source 1..22: mol_type = other RNA
ttatcatgttagagctgtctat

SEQ ID NO: 6901 - RNA, 22 nt, synthetic construct
  source 1..22: mol_type = other RNA
ttatcctgcaataccatactgg

SEQ ID NO: 6902 - RNA, 22 nt, synthetic construct
  source 1..22: mol_type = other RNA
ttatctcctctagtggcctggg

SEQ ID NO: 6903 - RNA, 22 nt, synthetic construct
  source 1..22: mol_type = other RNA
ttattcttcagacagaagagag

SEQ ID NO: 6904 - RNA, 22 nt, synthetic construct
  source 1..22: mol_type = other RNA
ttcaaatctcctgttatattct

SEQ ID NO: 6905 - RNA, 22 nt, synthetic construct
  source 1..22: mol_type = other RNA
ttcaatgaaattctactgccca

SEQ ID NO: 6906 - RNA, 22 nt, synthetic construct
  source 1..22: mol_type = other RNA
ttcactgtcctgaggactattt

SEQ ID NO: 6907 - RNA, 22 nt, synthetic construct
  source 1..22: mol_type = other RNA
ttcagacagaagagaggagtta

SEQ ID NO: 6908 - RNA, 22 nt, synthetic construct
  source 1..22: mol_type = other RNA
ttcagcatcaatgtaccctggg

SEQ ID NO: 6909 - RNA, 22 nt, synthetic construct
  source 1..22: mol_type = other RNA
ttcaggtcctggctctacaatt

SEQ ID NO: 6910 - RNA, 22 nt, synthetic construct
  source 1..22: mol_type = other RNA
ttcatgccactccacaggagaa

SEQ ID NO: 6911 - RNA, 22 nt, synthetic construct
  source 1..22: mol_type = other RNA
ttcattgaaaagcctttggact

SEQ ID NO: 6912 - RNA, 22 nt, synthetic construct
  source 1..22: mol_type = other RNA
ttcattttctctcctcagcaga

SEQ ID NO: 6913 - RNA, 22 nt, synthetic construct
  source 1..22: mol_type = other RNA
ttccacattggacatctctgct

SEQ ID NO: 6914 - RNA, 22 nt, synthetic construct
  source 1..22: mol_type = other RNA
ttcccaggccactagaggagat

SEQ ID NO: 6915 - RNA, 22 nt, synthetic construct
  source 1..22: mol_type = other RNA
ttccctgctaaaatgttactct

SEQ ID NO: 6916 - RNA, 22 nt, synthetic construct
  source 1..22: mol_type = other RNA
ttccctgttctagaatataaca

SEQ ID NO: 6917 - RNA, 22 nt, synthetic construct
  source 1..22: mol_type = other RNA
ttcccttctcctgtggagtggc

SEQ ID NO: 6918 - RNA, 22 nt, synthetic construct
  source 1..22: mol_type = other RNA
ttccctttatctcctctagtgg

SEQ ID NO: 6919 - RNA, 22 nt, synthetic construct
  source 1..22: mol_type = other RNA
ttcctccctctctcttgcttct

SEQ ID NO: 6920 - RNA, 22 nt, synthetic construct
  source 1..22: mol_type = other RNA
ttcctgatgctctcccaaatca

SEQ ID NO: 6921 - RNA, 22 nt, synthetic construct
  source 1..22: mol_type = other RNA
ttcctgtatggggactgtgttt

SEQ ID NO: 6922 - RNA, 22 nt, synthetic construct
  source 1..22: mol_type = other RNA
ttcctttgccctctctgtagag

SEQ ID NO: 6923 - RNA, 22 nt, synthetic construct
  source 1..22: mol_type = other RNA
ttctactgcccagggtacattg

SEQ ID NO: 6924 - RNA, 22 nt, synthetic construct
  source 1..22: mol_type = other RNA
ttctagaacagggaattgattt

SEQ ID NO: 6925 - RNA, 22 nt, synthetic construct
  source 1..22: mol_type = other RNA
ttctagaatataacaggagatt

SEQ ID NO: 6926 - RNA, 22 nt, synthetic construct
  source 1..22: mol_type = other RNA
ttctcagaacatgtccccgtca

SEQ ID NO: 6927 - RNA, 22 nt, synthetic construct
  source 1..22: mol_type = other RNA
ttctccacatagtgagggttat

SEQ ID NO: 6928 - RNA, 22 nt, synthetic construct
  source 1..22: mol_type = other RNA
ttctcctgtggagtggcatgaa

SEQ ID NO: 6929 - RNA, 22 nt, synthetic construct
  source 1..22: mol_type = other RNA
ttctctcctcagcagagatgtc

SEQ ID NO: 6930 - RNA, 22 nt, synthetic construct
  source 1..22: mol_type = other RNA
ttctctgcatctttagttggag

SEQ ID NO: 6931 - RNA, 22 nt, synthetic construct
  source 1..22: mol_type = other RNA
ttctgagaaatgcttacacaaa

SEQ ID NO: 6932 - RNA, 22 nt, synthetic construct
  source 1..22: mol_type = other RNA
ttctgccatttccacattggac

SEQ ID NO: 6933 - RNA, 22 nt, synthetic construct
  source 1..22: mol_type = other RNA
ttctggagctccttgtagttac

SEQ ID NO: 6934 - RNA, 22 nt, synthetic construct
  source 1..22: mol_type = other RNA
ttctgtctgaagaataaaacaa

SEQ ID NO: 6935 - RNA, 22 nt, synthetic construct
  source 1..22: mol_type = other RNA
ttcttcagacagaagagaggag

SEQ ID NO: 6936 - RNA, 22 nt, synthetic construct
  source 1..22: mol_type = other RNA
ttcttcatgccactccacagga

SEQ ID NO: 6937 - RNA, 22 nt, synthetic construct
  source 1..22: mol_type = other RNA
ttcttctgccatttccacattg

SEQ ID NO: 6938 - RNA, 22 nt, synthetic construct
  source 1..22: mol_type = other RNA
ttcttctttccctgctaaaatg

SEQ ID NO: 6939 - RNA, 22 nt, synthetic construct
  source 1..22: mol_type = other RNA
ttctttccctgctaaaatgtta

SEQ ID NO: 6940 - RNA, 22 nt, synthetic construct
  source 1..22: mol_type = other RNA
ttgaaaagcctttggactccaa

SEQ ID NO: 6941 - RNA, 22 nt, synthetic construct
  source 1..22: mol_type = other RNA
ttgaatggggtttcagcatcaa

SEQ ID NO: 6942 - RNA, 22 nt, synthetic construct
  source 1..22: mol_type = other RNA
ttgacagagtaacattttagca

SEQ ID NO: 6943 - RNA, 22 nt, synthetic construct
  source 1..22: mol_type = other RNA
ttgaccttgagaaaatgttttt

SEQ ID NO: 6944 - RNA, 22 nt, synthetic construct
  source 1..22: mol_type = other RNA
ttgatctttcttctgccatttc

SEQ ID NO: 6945 - RNA, 22 nt, synthetic construct
  source 1..22: mol_type = other RNA
ttgatgctgaaaccccattcaa

SEQ ID NO: 6946 - RNA, 22 nt, synthetic construct
  source 1..22: mol_type = other RNA
ttgatttgggagagcatcagga

SEQ ID NO: 6947 - RNA, 22 nt, synthetic construct
  source 1..22: mol_type = other RNA
ttgcaggataaaggcaggtggt

SEQ ID NO: 6948 - RNA, 22 nt, synthetic construct
  source 1..22: mol_type = other RNA
ttgcaggtaatgtgggtaacca

SEQ ID NO: 6949 - RNA, 22 nt, synthetic construct
  source 1..22: mol_type = other RNA
ttgccctctctgtagagggtca

SEQ ID NO: 6950 - RNA, 22 nt, synthetic construct
  source 1..22: mol_type = other RNA
ttgcctcttagaggttcccagg

SEQ ID NO: 6951 - RNA, 22 nt, synthetic construct
  source 1..22: mol_type = other RNA
ttgctcctagactacaaacctg

SEQ ID NO: 6952 - RNA, 22 nt, synthetic construct
  source 1..22: mol_type = other RNA
ttgcttctggagctccttgtag

SEQ ID NO: 6953 - RNA, 22 nt, synthetic construct
  source 1..22: mol_type = other RNA
ttggacatctctgctgaggaga

SEQ ID NO: 6954 - RNA, 22 nt, synthetic construct
  source 1..22: mol_type = other RNA
ttggactccaactaaagatgca

SEQ ID NO: 6955 - RNA, 22 nt, synthetic construct
  source 1..22: mol_type = other RNA
ttggacttctctgcatctttag

SEQ ID NO: 6956 - RNA, 22 nt, synthetic construct
  source 1..22: mol_type = other RNA
ttggagtccaaaggcttttcaa

SEQ ID NO: 6957 - RNA, 22 nt, synthetic construct
  source 1..22: mol_type = other RNA
ttgggagagcatcaggaaggtg

SEQ ID NO: 6958 - RNA, 22 nt, synthetic construct
  source 1..22: mol_type = other RNA
ttgtagagccaggacctgaact

SEQ ID NO: 6959 - RNA, 22 nt, synthetic construct
  source 1..22: mol_type = other RNA
ttgtagcctactacacgcatag

SEQ ID NO: 6960 - RNA, 22 nt, synthetic construct
  source 1..22: mol_type = other RNA
ttgtgtaagcatttctcagaac

SEQ ID NO: 6961 - RNA, 22 nt, synthetic construct
  source 1..22: mol_type = other RNA
ttgtttcactgtcctgaggact

SEQ ID NO: 6962 - RNA, 22 nt, synthetic construct
  source 1..22: mol_type = other RNA
ttgttttattcttcagacagaa

SEQ ID NO: 6963 - RNA, 22 nt, synthetic construct
  source 1..22: mol_type = other RNA
tttactaacagtgtgactgggc

SEQ ID NO: 6964 - RNA, 22 nt, synthetic construct
  source 1..22: mol_type = other RNA
tttagcagggaaagaagaatcc

SEQ ID NO: 6965 - RNA, 22 nt, synthetic construct
  source 1..22: mol_type = other RNA
tttagttggagtccaaaggctt

SEQ ID NO: 6966 - RNA, 22 nt, synthetic construct
  source 1..22: mol_type = other RNA
tttatagacagctctaacatga

SEQ ID NO: 6967 - RNA, 22 nt, synthetic construct
  source 1..22: mol_type = other RNA
tttatcctgcaataccatactg

SEQ ID NO: 6968 - RNA, 22 nt, synthetic construct
  source 1..22: mol_type = other RNA
tttatctcctctagtggcctgg

SEQ ID NO: 6969 - RNA, 22 nt, synthetic construct
  source 1..22: mol_type = other RNA
tttattcttcagacagaagaga

SEQ ID NO: 6970 - RNA, 22 nt, synthetic construct
  source 1..22: mol_type = other RNA
tttcaatgaaattctactgccc

SEQ ID NO: 6971 - RNA, 22 nt, synthetic construct
  source 1..22: mol_type = other RNA
tttcactgtcctgaggactatt

SEQ ID NO: 6972 - RNA, 22 nt, synthetic construct
  source 1..22: mol_type = other RNA
tttcagcatcaatgtaccctgg

SEQ ID NO: 6973 - RNA, 22 nt, synthetic construct
  source 1..22: mol_type = other RNA
tttcattgaaaagcctttggac

SEQ ID NO: 6974 - RNA, 22 nt, synthetic construct
  source 1..22: mol_type = other RNA
tttccacattggacatctctgc

SEQ ID NO: 6975 - RNA, 22 nt, synthetic construct
  source 1..22: mol_type = other RNA
tttccctgctaaaatgttactc

SEQ ID NO: 6976 - RNA, 22 nt, synthetic construct
  source 1..22: mol_type = other RNA
tttccctttatctcctctagtg

SEQ ID NO: 6977 - RNA, 22 nt, synthetic construct
  source 1..22: mol_type = other RNA
tttctcagaacatgtccccgtc

SEQ ID NO: 6978 - RNA, 22 nt, synthetic construct
  source 1..22: mol_type = other RNA
tttctctcctcagcagagatgt

SEQ ID NO: 6979 - RNA, 22 nt, synthetic construct
  source 1..22: mol_type = other RNA
tttcttctgccatttccacatt

SEQ ID NO: 6980 - RNA, 22 nt, synthetic construct
  source 1..22: mol_type = other RNA
tttgaatggggtttcagcatca

SEQ ID NO: 6981 - RNA, 22 nt, synthetic construct
  source 1..22: mol_type = other RNA
tttgaccttgagaaaatgtttt

SEQ ID NO: 6982 - RNA, 22 nt, synthetic construct
  source 1..22: mol_type = other RNA
tttgatctttcttctgccattt

SEQ ID NO: 6983 - RNA, 22 nt, synthetic construct
  source 1..22: mol_type = other RNA
tttgccctctctgtagagggtc

SEQ ID NO: 6984 - RNA, 22 nt, synthetic construct
  source 1..22: mol_type = other RNA
tttgcctcttagaggttcccag

SEQ ID NO: 6985 - RNA, 22 nt, synthetic construct
  source 1..22: mol_type = other RNA
tttggactccaactaaagatgc

SEQ ID NO: 6986 - RNA, 22 nt, synthetic construct
  source 1..22: mol_type = other RNA
tttgggagagcatcaggaaggt

SEQ ID NO: 6987 - RNA, 22 nt, synthetic construct
  source 1..22: mol_type = other RNA
tttgtgtaagcatttctcagaa

SEQ ID NO: 6988 - RNA, 22 nt, synthetic construct
  source 1..22: mol_type = other RNA
tttgtttcactgtcctgaggac

SEQ ID NO: 6989 - RNA, 22 nt, synthetic construct
  source 1..22: mol_type = other RNA
ttttagcagggaaagaagaatc

SEQ ID NO: 6990 - RNA, 22 nt, synthetic construct
  source 1..22: mol_type = other RNA
ttttattcttcagacagaagag

SEQ ID NO: 6991 - RNA, 22 nt, synthetic construct
  source 1..22: mol_type = other RNA
ttttcaatgaaattctactgcc

SEQ ID NO: 6992 - RNA, 22 nt, synthetic construct
  source 1..22: mol_type = other RNA
ttttctctcctcagcagagatg

SEQ ID NO: 6993 - RNA, 22 nt, synthetic construct
  source 1..22: mol_type = other RNA
ttttgaccttgagaaaatgttt

SEQ ID NO: 6994 - RNA, 22 nt, synthetic construct
  source 1..22: mol_type = other RNA
ttttgtttcactgtcctgagga

SEQ ID NO: 6995 - RNA, 22 nt, synthetic construct
  source 1..22: mol_type = other RNA
tttttgaccttgagaaaatgtt

SEQ ID NO: 6996 - RNA, 22 nt, synthetic construct
  source 1..22: mol_type = other RNA
tttttgtttcactgtcctgagg

SEQ ID NO: 6997 - RNA, 20 nt, synthetic construct
  source 1..20: mol_type = other RNA
aaaaaatgctgatatgatgt

SEQ ID NO: 6998 - RNA, 20 nt, synthetic construct
  source 1..20: mol_type = other RNA
aaaaaggtgatctacacagt

SEQ ID NO: 6999 - RNA, 20 nt, synthetic construct
  source 1..20: mol_type = other RNA
aaaaaggttagcaatgaatt

SEQ ID NO: 7000 - RNA, 20 nt, synthetic construct
  source 1..20: mol_type = other RNA
aaaaatgctgatatgatgtt

SEQ ID NO: 7001 - RNA, 20 nt, synthetic construct
  source 1..20: mol_type = other RNA
aaaacatcatatcagcattt

SEQ ID NO: 7002 - RNA, 20 nt, synthetic construct
  source 1..20: mol_type = other RNA
aaaagaaaaaggttagcaat

SEQ ID NO: 7003 - RNA, 20 nt, synthetic construct
  source 1..20: mol_type = other RNA
aaaagaagtagctgcagaca

SEQ ID NO: 7004 - RNA, 20 nt, synthetic construct
  source 1..20: mol_type = other RNA
aaaaggtgatctacacagta

SEQ ID NO: 7005 - RNA, 20 nt, synthetic construct
  source 1..20: mol_type = other RNA
aaaaggttagcaatgaattt

SEQ ID NO: 7006 - RNA, 20 nt, synthetic construct
  source 1..20: mol_type = other RNA
aaaatgctgatatgatgttt

SEQ ID NO: 7007 - RNA, 20 nt, synthetic construct
  source 1..20: mol_type = other RNA
aaacatcatatcagcatttt

SEQ ID NO: 7008 - RNA, 20 nt, synthetic construct
  source 1..20: mol_type = other RNA
aaacccattataaagagtat

SEQ ID NO: 7009 - RNA, 20 nt, synthetic construct
  source 1..20: mol_type = other RNA
aaacttgtctaatttctact

SEQ ID NO: 7010 - RNA, 20 nt, synthetic construct
  source 1..20: mol_type = other RNA
aaagaaaaaggttagcaatg

SEQ ID NO: 7011 - RNA, 20 nt, synthetic construct
  source 1..20: mol_type = other RNA
aaagaaaagaaaaaggttag

SEQ ID NO: 7012 - RNA, 20 nt, synthetic construct
  source 1..20: mol_type = other RNA
aaagaagtagctgcagacag

SEQ ID NO: 7013 - RNA, 20 nt, synthetic construct
  source 1..20: mol_type = other RNA
aaagagtatatcctgttagt

SEQ ID NO: 7014 - RNA, 20 nt, synthetic construct
  source 1..20: mol_type = other RNA
aaagggatacactaacagga

SEQ ID NO: 7015 - RNA, 20 nt, synthetic construct
  source 1..20: mol_type = other RNA
aaaggtgatctacacagtag

SEQ ID NO: 7016 - RNA, 20 nt, synthetic construct
  source 1..20: mol_type = other RNA
aaaggttagcaatgaattta

SEQ ID NO: 7017 - RNA, 20 nt, synthetic construct
  source 1..20: mol_type = other RNA
aaataaattcattgctaacc

SEQ ID NO: 7018 - RNA, 20 nt, synthetic construct
  source 1..20: mol_type = other RNA
aaatgctgatatgatgtttt

SEQ ID NO: 7019 - RNA, 20 nt, synthetic construct
  source 1..20: mol_type = other RNA
aaattagacaagtttggtaa

SEQ ID NO: 7020 - RNA, 20 nt, synthetic construct
  source 1..20: mol_type = other RNA
aaattcattgctaacctttt

SEQ ID NO: 7021 - RNA, 20 nt, synthetic construct
  source 1..20: mol_type = other RNA
aacaggatatactctttata

SEQ ID NO: 7022 - RNA, 20 nt, synthetic construct
  source 1..20: mol_type = other RNA
aacatcatatcagcattttt

SEQ ID NO: 7023 - RNA, 20 nt, synthetic construct
  source 1..20: mol_type = other RNA
aacccattataaagagtata

SEQ ID NO: 7024 - RNA, 20 nt, synthetic construct
  source 1..20: mol_type = other RNA
aactgtctgcagctacttct

SEQ ID NO: 7025 - RNA, 20 nt, synthetic construct
  source 1..20: mol_type = other RNA
aacttgtctaatttctactg

SEQ ID NO: 7026 - RNA, 20 nt, synthetic construct
  source 1..20: mol_type = other RNA
aagaaaaaatgctgatatga

SEQ ID NO: 7027 - RNA, 20 nt, synthetic construct
  source 1..20: mol_type = other RNA
aagaaaaaggttagcaatga

SEQ ID NO: 7028 - RNA, 20 nt, synthetic construct
  source 1..20: mol_type = other RNA
aagaaaagaaaaaggttagc

SEQ ID NO: 7029 - RNA, 20 nt, synthetic construct
  source 1..20: mol_type = other RNA
aagaagtagctgcagacagt

SEQ ID NO: 7030 - RNA, 20 nt, synthetic construct
  source 1..20: mol_type = other RNA
aagagtatatcctgttagtg

SEQ ID NO: 7031 - RNA, 20 nt, synthetic construct
  source 1..20: mol_type = other RNA
aagattttgggagcaccaaa

SEQ ID NO: 7032 - RNA, 20 nt, synthetic construct
  source 1..20: mol_type = other RNA
aagggatacactaacaggat

SEQ ID NO: 7033 - RNA, 20 nt, synthetic construct
  source 1..20: mol_type = other RNA
aaggtgatctacacagtaga

SEQ ID NO: 7034 - RNA, 20 nt, synthetic construct
  source 1..20: mol_type = other RNA
aaggttagcaatgaatttat

SEQ ID NO: 7035 - RNA, 20 nt, synthetic construct
  source 1..20: mol_type = other RNA
aagtagctgcagacagttct

SEQ ID NO: 7036 - RNA, 20 nt, synthetic construct
  source 1..20: mol_type = other RNA
aagtttggtaatgagatctg

SEQ ID NO: 7037 - RNA, 20 nt, synthetic construct
  source 1..20: mol_type = other RNA
aataaattcattgctaacct

SEQ ID NO: 7038 - RNA, 20 nt, synthetic construct
  source 1..20: mol_type = other RNA
aatcttagaagaaaaaatgc

SEQ ID NO: 7039 - RNA, 20 nt, synthetic construct
  source 1..20: mol_type = other RNA
aatcttatgagaccactgtc

SEQ ID NO: 7040 - RNA, 20 nt, synthetic construct
  source 1..20: mol_type = other RNA
aatgagatctgcaatccaaa

SEQ ID NO: 7041 - RNA, 20 nt, synthetic construct
  source 1..20: mol_type = other RNA
aatgatggactgtatatatg

SEQ ID NO: 7042 - RNA, 20 nt, synthetic construct
  source 1..20: mol_type = other RNA
aatgctgatatgatgttttg

SEQ ID NO: 7043 - RNA, 20 nt, synthetic construct
  source 1..20: mol_type = other RNA
aatgggtttggagaactgtc

SEQ ID NO: 7044 - RNA, 20 nt, synthetic construct
  source 1..20: mol_type = other RNA
aattagacaagtttggtaat

SEQ ID NO: 7045 - RNA, 20 nt, synthetic construct
  source 1..20: mol_type = other RNA
aattcattgctaaccttttt

SEQ ID NO: 7046 - RNA, 20 nt, synthetic construct
  source 1..20: mol_type = other RNA
aatttctactgtgtagatca

SEQ ID NO: 7047 - RNA, 20 nt, synthetic construct
  source 1..20: mol_type = other RNA
acaagtttggtaatgagatc

SEQ ID NO: 7048 - RNA, 20 nt, synthetic construct
  source 1..20: mol_type = other RNA
acacagtagaaattagacaa

SEQ ID NO: 7049 - RNA, 20 nt, synthetic construct
  source 1..20: mol_type = other RNA
acactaacaggatatactct

SEQ ID NO: 7050 - RNA, 20 nt, synthetic construct
  source 1..20: mol_type = other RNA
acaggatatactctttataa

SEQ ID NO: 7051 - RNA, 20 nt, synthetic construct
  source 1..20: mol_type = other RNA
acagtagaaattagacaagt

SEQ ID NO: 7052 - RNA, 20 nt, synthetic construct
  source 1..20: mol_type = other RNA
acagtccatcattgaccaaa

SEQ ID NO: 7053 - RNA, 20 nt, synthetic construct
  source 1..20: mol_type = other RNA
acagtggtctcataagatta

SEQ ID NO: 7054 - RNA, 20 nt, synthetic construct
  source 1..20: mol_type = other RNA
acagttctccaaacccatta

SEQ ID NO: 7055 - RNA, 20 nt, synthetic construct
  source 1..20: mol_type = other RNA
acatcatatcagcatttttt

SEQ ID NO: 7056 - RNA, 20 nt, synthetic construct
  source 1..20: mol_type = other RNA
accaaaacatcatatcagca

SEQ ID NO: 7057 - RNA, 20 nt, synthetic construct
  source 1..20: mol_type = other RNA
accaaacttgtctaatttct

SEQ ID NO: 7058 - RNA, 20 nt, synthetic construct
  source 1..20: mol_type = other RNA
accaaagggatacactaaca

SEQ ID NO: 7059 - RNA, 20 nt, synthetic construct
  source 1..20: mol_type = other RNA
accactgtcatatatacagt

SEQ ID NO: 7060 - RNA, 20 nt, synthetic construct
  source 1..20: mol_type = other RNA
acccattataaagagtatat

SEQ ID NO: 7061 - RNA, 20 nt, synthetic construct
  source 1..20: mol_type = other RNA
acctttttaaaagaagtagc

SEQ ID NO: 7062 - RNA, 20 nt, synthetic construct
  source 1..20: mol_type = other RNA
actaacaggatatactcttt

SEQ ID NO: 7063 - RNA, 20 nt, synthetic construct
  source 1..20: mol_type = other RNA
actctttataatgggtttgg

SEQ ID NO: 7064 - RNA, 20 nt, synthetic construct
  source 1..20: mol_type = other RNA
actgtatatatgacagtggt

SEQ ID NO: 7065 - RNA, 20 nt, synthetic construct
  source 1..20: mol_type = other RNA
actgtcatatatacagtcca

SEQ ID NO: 7066 - RNA, 20 nt, synthetic construct
  source 1..20: mol_type = other RNA
actgtctgcagctacttctt

SEQ ID NO: 7067 - RNA, 20 nt, synthetic construct
  source 1..20: mol_type = other RNA
actgtgtagatcaccttttt

SEQ ID NO: 7068 - RNA, 20 nt, synthetic construct
  source 1..20: mol_type = other RNA
acttcttttaaaaaggtgat

SEQ ID NO: 7069 - RNA, 20 nt, synthetic construct
  source 1..20: mol_type = other RNA
acttgtctaatttctactgt

SEQ ID NO: 7070 - RNA, 20 nt, synthetic construct
  source 1..20: mol_type = other RNA
agaaaaaatgctgatatgat

SEQ ID NO: 7071 - RNA, 20 nt, synthetic construct
  source 1..20: mol_type = other RNA
agaaaaaggttagcaatgaa

SEQ ID NO: 7072 - RNA, 20 nt, synthetic construct
  source 1..20: mol_type = other RNA
agaaaagaaaaaggttagca

SEQ ID NO: 7073 - RNA, 20 nt, synthetic construct
  source 1..20: mol_type = other RNA
agaaattagacaagtttggt

SEQ ID NO: 7074 - RNA, 20 nt, synthetic construct
  source 1..20: mol_type = other RNA
agaactgtctgcagctactt

SEQ ID NO: 7075 - RNA, 20 nt, synthetic construct
  source 1..20: mol_type = other RNA
agaagaaaaaatgctgatat

SEQ ID NO: 7076 - RNA, 20 nt, synthetic construct
  source 1..20: mol_type = other RNA
agaagtagctgcagacagtt

SEQ ID NO: 7077 - RNA, 20 nt, synthetic construct
  source 1..20: mol_type = other RNA
agacaagtttggtaatgaga

SEQ ID NO: 7078 - RNA, 20 nt, synthetic construct
  source 1..20: mol_type = other RNA
agacagttctccaaacccat

SEQ ID NO: 7079 - RNA, 20 nt, synthetic construct
  source 1..20: mol_type = other RNA
agaccactgtcatatataca

SEQ ID NO: 7080 - RNA, 20 nt, synthetic construct
  source 1..20: mol_type = other RNA
agagtatatcctgttagtgt

SEQ ID NO: 7081 - RNA, 20 nt, synthetic construct
  source 1..20: mol_type = other RNA
agatcacctttttaaaagaa

SEQ ID NO: 7082 - RNA, 20 nt, synthetic construct
  source 1..20: mol_type = other RNA
agatctcattaccaaacttg

SEQ ID NO: 7083 - RNA, 20 nt, synthetic construct
  source 1..20: mol_type = other RNA
agatctgcaatccaaataaa

SEQ ID NO: 7084 - RNA, 20 nt, synthetic construct
  source 1..20: mol_type = other RNA
agattttgggagcaccaaag

SEQ ID NO: 7085 - RNA, 20 nt, synthetic construct
  source 1..20: mol_type = other RNA
agcaccaaagggatacacta

SEQ ID NO: 7086 - RNA, 20 nt, synthetic construct
  source 1..20: mol_type = other RNA
agcattttttcttctaagat

SEQ ID NO: 7087 - RNA, 20 nt, synthetic construct
  source 1..20: mol_type = other RNA
agctacttcttttaaaaagg

SEQ ID NO: 7088 - RNA, 20 nt, synthetic construct
  source 1..20: mol_type = other RNA
agctgcagacagttctccaa

SEQ ID NO: 7089 - RNA, 20 nt, synthetic construct
  source 1..20: mol_type = other RNA
aggatatactctttataatg

SEQ ID NO: 7090 - RNA, 20 nt, synthetic construct
  source 1..20: mol_type = other RNA
agggatacactaacaggata

SEQ ID NO: 7091 - RNA, 20 nt, synthetic construct
  source 1..20: mol_type = other RNA
aggtgatctacacagtagaa

SEQ ID NO: 7092 - RNA, 20 nt, synthetic construct
  source 1..20: mol_type = other RNA
aggttagcaatgaatttatt

SEQ ID NO: 7093 - RNA, 20 nt, synthetic construct
  source 1..20: mol_type = other RNA
agtagaaattagacaagttt

SEQ ID NO: 7094 - RNA, 20 nt, synthetic construct
  source 1..20: mol_type = other RNA
agtagctgcagacagttctc

SEQ ID NO: 7095 - RNA, 20 nt, synthetic construct
  source 1..20: mol_type = other RNA
agtatatcctgttagtgtat

SEQ ID NO: 7096 - RNA, 20 nt, synthetic construct
  source 1..20: mol_type = other RNA
agtccatcattgaccaaaac

SEQ ID NO: 7097 - RNA, 20 nt, synthetic construct
  source 1..20: mol_type = other RNA
agtggtctcataagattaaa

SEQ ID NO: 7098 - RNA, 20 nt, synthetic construct
  source 1..20: mol_type = other RNA
agtgtatccctttggtgctc

SEQ ID NO: 7099 - RNA, 20 nt, synthetic construct
  source 1..20: mol_type = other RNA
agttctccaaacccattata

SEQ ID NO: 7100 - RNA, 20 nt, synthetic construct
  source 1..20: mol_type = other RNA
agtttggtaatgagatctgc

SEQ ID NO: 7101 - RNA, 20 nt, synthetic construct
  source 1..20: mol_type = other RNA
ataaagagtatatcctgtta

SEQ ID NO: 7102 - RNA, 20 nt, synthetic construct
  source 1..20: mol_type = other RNA
ataaattcattgctaacctt

SEQ ID NO: 7103 - RNA, 20 nt, synthetic construct
  source 1..20: mol_type = other RNA
ataatgggtttggagaactg

SEQ ID NO: 7104 - RNA, 20 nt, synthetic construct
  source 1..20: mol_type = other RNA
atacactaacaggatatact

SEQ ID NO: 7105 - RNA, 20 nt, synthetic construct
  source 1..20: mol_type = other RNA
atactctttataatgggttt

SEQ ID NO: 7106 - RNA, 20 nt, synthetic construct
  source 1..20: mol_type = other RNA
atatacagtccatcattgac

SEQ ID NO: 7107 - RNA, 20 nt, synthetic construct
  source 1..20: mol_type = other RNA
atatactctttataatgggt

SEQ ID NO: 7108 - RNA, 20 nt, synthetic construct
  source 1..20: mol_type = other RNA
atatatacagtccatcattg

SEQ ID NO: 7109 - RNA, 20 nt, synthetic construct
  source 1..20: mol_type = other RNA
atatcagcattttttcttct

SEQ ID NO: 7110 - RNA, 20 nt, synthetic construct
  source 1..20: mol_type = other RNA
atatcctgttagtgtatccc

SEQ ID NO: 7111 - RNA, 20 nt, synthetic construct
  source 1..20: mol_type = other RNA
atatgatgttttggtcaatg

SEQ ID NO: 7112 - RNA, 20 nt, synthetic construct
  source 1..20: mol_type = other RNA
atcacctttttaaaagaagt

SEQ ID NO: 7113 - RNA, 20 nt, synthetic construct
  source 1..20: mol_type = other RNA
atcagcattttttcttctaa

SEQ ID NO: 7114 - RNA, 20 nt, synthetic construct
  source 1..20: mol_type = other RNA
atcatatcagcattttttct

SEQ ID NO: 7115 - RNA, 20 nt, synthetic construct
  source 1..20: mol_type = other RNA
atcattgaccaaaacatcat

SEQ ID NO: 7116 - RNA, 20 nt, synthetic construct
  source 1..20: mol_type = other RNA
atccctttggtgctcccaaa

SEQ ID NO: 7117 - RNA, 20 nt, synthetic construct
  source 1..20: mol_type = other RNA
atcctgttagtgtatccctt

SEQ ID NO: 7118 - RNA, 20 nt, synthetic construct
  source 1..20: mol_type = other RNA
atctacacagtagaaattag

SEQ ID NO: 7119 - RNA, 20 nt, synthetic construct
  source 1..20: mol_type = other RNA
atctcattaccaaacttgtc

SEQ ID NO: 7120 - RNA, 20 nt, synthetic construct
  source 1..20: mol_type = other RNA
atctgcaatccaaataaaat

SEQ ID NO: 7121 - RNA, 20 nt, synthetic construct
  source 1..20: mol_type = other RNA
atcttagaagaaaaaatgct

SEQ ID NO: 7122 - RNA, 20 nt, synthetic construct
  source 1..20: mol_type = other RNA
atcttatgagaccactgtca

SEQ ID NO: 7123 - RNA, 20 nt, synthetic construct
  source 1..20: mol_type = other RNA
atgacagtggtctcataaga

SEQ ID NO: 7124 - RNA, 20 nt, synthetic construct
  source 1..20: mol_type = other RNA
atgagaccactgtcatatat

SEQ ID NO: 7125 - RNA, 20 nt, synthetic construct
  source 1..20: mol_type = other RNA
atgagatctgcaatccaaat

SEQ ID NO: 7126 - RNA, 20 nt, synthetic construct
  source 1..20: mol_type = other RNA
atgctgatatgatgttttgg

SEQ ID NO: 7127 - RNA, 20 nt, synthetic construct
  source 1..20: mol_type = other RNA
atggactgtatatatgacag

SEQ ID NO: 7128 - RNA, 20 nt, synthetic construct
  source 1..20: mol_type = other RNA
atgggtttggagaactgtct

SEQ ID NO: 7129 - RNA, 20 nt, synthetic construct
  source 1..20: mol_type = other RNA
atgttttggtcaatgatgga

SEQ ID NO: 7130 - RNA, 20 nt, synthetic construct
  source 1..20: mol_type = other RNA
attaccaaacttgtctaatt

SEQ ID NO: 7131 - RNA, 20 nt, synthetic construct
  source 1..20: mol_type = other RNA
attagacaagtttggtaatg

SEQ ID NO: 7132 - RNA, 20 nt, synthetic construct
  source 1..20: mol_type = other RNA
attataaagagtatatcctg

SEQ ID NO: 7133 - RNA, 20 nt, synthetic construct
  source 1..20: mol_type = other RNA
attcattgctaacctttttc

SEQ ID NO: 7134 - RNA, 20 nt, synthetic construct
  source 1..20: mol_type = other RNA
attgaccaaaacatcatatc

SEQ ID NO: 7135 - RNA, 20 nt, synthetic construct
  source 1..20: mol_type = other RNA
attgcagatctcattaccaa

SEQ ID NO: 7136 - RNA, 20 nt, synthetic construct
  source 1..20: mol_type = other RNA
attgctaacctttttctttt

SEQ ID NO: 7137 - RNA, 20 nt, synthetic construct
  source 1..20: mol_type = other RNA
atttctactgtgtagatcac

SEQ ID NO: 7138 - RNA, 20 nt, synthetic construct
  source 1..20: mol_type = other RNA
atttggattgcagatctcat

SEQ ID NO: 7139 - RNA, 20 nt, synthetic construct
  source 1..20: mol_type = other RNA
attttatttggattgcagat

SEQ ID NO: 7140 - RNA, 20 nt, synthetic construct
  source 1..20: mol_type = other RNA
attttgggagcaccaaaggg

SEQ ID NO: 7141 - RNA, 20 nt, synthetic construct
  source 1..20: mol_type = other RNA
caaaacatcatatcagcatt

SEQ ID NO: 7142 - RNA, 20 nt, synthetic construct
  source 1..20: mol_type = other RNA
caaacccattataaagagta

SEQ ID NO: 7143 - RNA, 20 nt, synthetic construct
  source 1..20: mol_type = other RNA
caaacttgtctaatttctac

SEQ ID NO: 7144 - RNA, 20 nt, synthetic construct
  source 1..20: mol_type = other RNA
caaagggatacactaacagg

SEQ ID NO: 7145 - RNA, 20 nt, synthetic construct
  source 1..20: mol_type = other RNA
caagtttggtaatgagatct

SEQ ID NO: 7146 - RNA, 20 nt, synthetic construct
  source 1..20: mol_type = other RNA
caatgatggactgtatatat

SEQ ID NO: 7147 - RNA, 20 nt, synthetic construct
  source 1..20: mol_type = other RNA
cacagtagaaattagacaag

SEQ ID NO: 7148 - RNA, 20 nt, synthetic construct
  source 1..20: mol_type = other RNA
caccaaagggatacactaac

SEQ ID NO: 7149 - RNA, 20 nt, synthetic construct
  source 1..20: mol_type = other RNA
cacctttttaaaagaagtag

SEQ ID NO: 7150 - RNA, 20 nt, synthetic construct
  source 1..20: mol_type = other RNA
cactaacaggatatactctt

SEQ ID NO: 7151 - RNA, 20 nt, synthetic construct
  source 1..20: mol_type = other RNA
cactgtcatatatacagtcc

SEQ ID NO: 7152 - RNA, 20 nt, synthetic construct
  source 1..20: mol_type = other RNA
cagacagttctccaaaccca

SEQ ID NO: 7153 - RNA, 20 nt, synthetic construct
  source 1..20: mol_type = other RNA
cagatctcattaccaaactt

SEQ ID NO: 7154 - RNA, 20 nt, synthetic construct
  source 1..20: mol_type = other RNA
cagcattttttcttctaaga

SEQ ID NO: 7155 - RNA, 20 nt, synthetic construct
  source 1..20: mol_type = other RNA
cagctacttcttttaaaaag

SEQ ID NO: 7156 - RNA, 20 nt, synthetic construct
  source 1..20: mol_type = other RNA
caggatatactctttataat

SEQ ID NO: 7157 - RNA, 20 nt, synthetic construct
  source 1..20: mol_type = other RNA
cagtagaaattagacaagtt

SEQ ID NO: 7158 - RNA, 20 nt, synthetic construct
  source 1..20: mol_type = other RNA
cagtccatcattgaccaaaa

SEQ ID NO: 7159 - RNA, 20 nt, synthetic construct
  source 1..20: mol_type = other RNA
cagtggtctcataagattaa

SEQ ID NO: 7160 - RNA, 20 nt, synthetic construct
  source 1..20: mol_type = other RNA
cagttctccaaacccattat

SEQ ID NO: 7161 - RNA, 20 nt, synthetic construct
  source 1..20: mol_type = other RNA
catatatacagtccatcatt

SEQ ID NO: 7162 - RNA, 20 nt, synthetic construct
  source 1..20: mol_type = other RNA
catatcagcattttttcttc

SEQ ID NO: 7163 - RNA, 20 nt, synthetic construct
  source 1..20: mol_type = other RNA
catcatatcagcattttttc

SEQ ID NO: 7164 - RNA, 20 nt, synthetic construct
  source 1..20: mol_type = other RNA
catcattgaccaaaacatca

SEQ ID NO: 7165 - RNA, 20 nt, synthetic construct
  source 1..20: mol_type = other RNA
cattaccaaacttgtctaat

SEQ ID NO: 7166 - RNA, 20 nt, synthetic construct
  source 1..20: mol_type = other RNA
cattataaagagtatatcct

SEQ ID NO: 7167 - RNA, 20 nt, synthetic construct
  source 1..20: mol_type = other RNA
cattgaccaaaacatcatat

SEQ ID NO: 7168 - RNA, 20 nt, synthetic construct
  source 1..20: mol_type = other RNA
cattgctaacctttttcttt

SEQ ID NO: 7169 - RNA, 20 nt, synthetic construct
  source 1..20: mol_type = other RNA
ccaaaacatcatatcagcat

SEQ ID NO: 7170 - RNA, 20 nt, synthetic construct
  source 1..20: mol_type = other RNA
ccaaaatcttagaagaaaaa

SEQ ID NO: 7171 - RNA, 20 nt, synthetic construct
  source 1..20: mol_type = other RNA
ccaaacccattataaagagt

SEQ ID NO: 7172 - RNA, 20 nt, synthetic construct
  source 1..20: mol_type = other RNA
ccaaacttgtctaatttcta

SEQ ID NO: 7173 - RNA, 20 nt, synthetic construct
  source 1..20: mol_type = other RNA
ccaaagggatacactaacag

SEQ ID NO: 7174 - RNA, 20 nt, synthetic construct
  source 1..20: mol_type = other RNA
ccactgtcatatatacagtc

SEQ ID NO: 7175 - RNA, 20 nt, synthetic construct
  source 1..20: mol_type = other RNA
ccatcattgaccaaaacatc

SEQ ID NO: 7176 - RNA, 20 nt, synthetic construct
  source 1..20: mol_type = other RNA
ccattataaagagtatatcc

SEQ ID NO: 7177 - RNA, 20 nt, synthetic construct
  source 1..20: mol_type = other RNA
cccaaaatcttagaagaaaa

SEQ ID NO: 7178 - RNA, 20 nt, synthetic construct
  source 1..20: mol_type = other RNA
cccattataaagagtatatc

SEQ ID NO: 7179 - RNA, 20 nt, synthetic construct
  source 1..20: mol_type = other RNA
ccctttggtgctcccaaaat

SEQ ID NO: 7180 - RNA, 20 nt, synthetic construct
  source 1..20: mol_type = other RNA
cctgttagtgtatccctttg

SEQ ID NO: 7181 - RNA, 20 nt, synthetic construct
  source 1..20: mol_type = other RNA
cctttggtgctcccaaaatc

SEQ ID NO: 7182 - RNA, 20 nt, synthetic construct
  source 1..20: mol_type = other RNA
cctttttaaaagaagtagct

SEQ ID NO: 7183 - RNA, 20 nt, synthetic construct
  source 1..20: mol_type = other RNA
ctaacaggatatactcttta

SEQ ID NO: 7184 - RNA, 20 nt, synthetic construct
  source 1..20: mol_type = other RNA
ctaagattttgggagcacca

SEQ ID NO: 7185 - RNA, 20 nt, synthetic construct
  source 1..20: mol_type = other RNA
ctaatttctactgtgtagat

SEQ ID NO: 7186 - RNA, 20 nt, synthetic construct
  source 1..20: mol_type = other RNA
ctacacagtagaaattagac

SEQ ID NO: 7187 - RNA, 20 nt, synthetic construct
  source 1..20: mol_type = other RNA
ctactgtgtagatcaccttt

SEQ ID NO: 7188 - RNA, 20 nt, synthetic construct
  source 1..20: mol_type = other RNA
ctacttcttttaaaaaggtg

SEQ ID NO: 7189 - RNA, 20 nt, synthetic construct
  source 1..20: mol_type = other RNA
ctattttaatcttatgagac

SEQ ID NO: 7190 - RNA, 20 nt, synthetic construct
  source 1..20: mol_type = other RNA
ctcataagattaaaatagca

SEQ ID NO: 7191 - RNA, 20 nt, synthetic construct
  source 1..20: mol_type = other RNA
ctcattaccaaacttgtcta

SEQ ID NO: 7192 - RNA, 20 nt, synthetic construct
  source 1..20: mol_type = other RNA
ctccaaacccattataaaga

SEQ ID NO: 7193 - RNA, 20 nt, synthetic construct
  source 1..20: mol_type = other RNA
ctcccaaaatcttagaagaa

SEQ ID NO: 7194 - RNA, 20 nt, synthetic construct
  source 1..20: mol_type = other RNA
ctctttataatgggtttgga

SEQ ID NO: 7195 - RNA, 20 nt, synthetic construct
  source 1..20: mol_type = other RNA
ctgaaaagaaaagaaaaagg

SEQ ID NO: 7196 - RNA, 20 nt, synthetic construct
  source 1..20: mol_type = other RNA
ctgatatgatgttttggtca

SEQ ID NO: 7197 - RNA, 20 nt, synthetic construct
  source 1..20: mol_type = other RNA
ctgcaatccaaataaaataa

SEQ ID NO: 7198 - RNA, 20 nt, synthetic construct
  source 1..20: mol_type = other RNA
ctgcagacagttctccaaac

SEQ ID NO: 7199 - RNA, 20 nt, synthetic construct
  source 1..20: mol_type = other RNA
ctgcagctacttcttttaaa

SEQ ID NO: 7200 - RNA, 20 nt, synthetic construct
  source 1..20: mol_type = other RNA
ctgtatatatgacagtggtc

SEQ ID NO: 7201 - RNA, 20 nt, synthetic construct
  source 1..20: mol_type = other RNA
ctgtcatatatacagtccat

SEQ ID NO: 7202 - RNA, 20 nt, synthetic construct
  source 1..20: mol_type = other RNA
ctgtctgcagctacttcttt

SEQ ID NO: 7203 - RNA, 20 nt, synthetic construct
  source 1..20: mol_type = other RNA
ctgtgtagatcaccttttta

SEQ ID NO: 7204 - RNA, 20 nt, synthetic construct
  source 1..20: mol_type = other RNA
ctgttagtgtatccctttgg

SEQ ID NO: 7205 - RNA, 20 nt, synthetic construct
  source 1..20: mol_type = other RNA
cttagaagaaaaaatgctga

SEQ ID NO: 7206 - RNA, 20 nt, synthetic construct
  source 1..20: mol_type = other RNA
cttatgagaccactgtcata

SEQ ID NO: 7207 - RNA, 20 nt, synthetic construct
  source 1..20: mol_type = other RNA
cttctaagattttgggagca

SEQ ID NO: 7208 - RNA, 20 nt, synthetic construct
  source 1..20: mol_type = other RNA
cttcttttaaaaaggtgatc

SEQ ID NO: 7209 - RNA, 20 nt, synthetic construct
  source 1..20: mol_type = other RNA
cttgtctaatttctactgtg

SEQ ID NO: 7210 - RNA, 20 nt, synthetic construct
  source 1..20: mol_type = other RNA
ctttataatgggtttggaga

SEQ ID NO: 7211 - RNA, 20 nt, synthetic construct
  source 1..20: mol_type = other RNA
ctttggtgctcccaaaatct

SEQ ID NO: 7212 - RNA, 20 nt, synthetic construct
  source 1..20: mol_type = other RNA
cttttaaaaaggtgatctac

SEQ ID NO: 7213 - RNA, 20 nt, synthetic construct
  source 1..20: mol_type = other RNA
ctttttaaaagaagtagctg

SEQ ID NO: 7214 - RNA, 20 nt, synthetic construct
  source 1..20: mol_type = other RNA
gaaaaaatgctgatatgatg

SEQ ID NO: 7215 - RNA, 20 nt, synthetic construct
  source 1..20: mol_type = other RNA
gaaaaaggttagcaatgaat

SEQ ID NO: 7216 - RNA, 20 nt, synthetic construct
  source 1..20: mol_type = other RNA
gaaaagaaaaaggttagcaa

SEQ ID NO: 7217 - RNA, 20 nt, synthetic construct
  source 1..20: mol_type = other RNA
gaaaagaaaagaaaaaggtt

SEQ ID NO: 7218 - RNA, 20 nt, synthetic construct
  source 1..20: mol_type = other RNA
gaaattagacaagtttggta

SEQ ID NO: 7219 - RNA, 20 nt, synthetic construct
  source 1..20: mol_type = other RNA
gaactgtctgcagctacttc

SEQ ID NO: 7220 - RNA, 20 nt, synthetic construct
  source 1..20: mol_type = other RNA
gaagaaaaaatgctgatatg

SEQ ID NO: 7221 - RNA, 20 nt, synthetic construct
  source 1..20: mol_type = other RNA
gaagtagctgcagacagttc

SEQ ID NO: 7222 - RNA, 20 nt, synthetic construct
  source 1..20: mol_type = other RNA
gacaagtttggtaatgagat

SEQ ID NO: 7223 - RNA, 20 nt, synthetic construct
  source 1..20: mol_type = other RNA
gacagtggtctcataagatt

SEQ ID NO: 7224 - RNA, 20 nt, synthetic construct
  source 1..20: mol_type = other RNA
gacagttctccaaacccatt

SEQ ID NO: 7225 - RNA, 20 nt, synthetic construct
  source 1..20: mol_type = other RNA
gaccaaaacatcatatcagc

SEQ ID NO: 7226 - RNA, 20 nt, synthetic construct
  source 1..20: mol_type = other RNA
gactgtatatatgacagtgg

SEQ ID NO: 7227 - RNA, 20 nt, synthetic construct
  source 1..20: mol_type = other RNA
gagaactgtctgcagctact

SEQ ID NO: 7228 - RNA, 20 nt, synthetic construct
  source 1..20: mol_type = other RNA
gagaccactgtcatatatac

SEQ ID NO: 7229 - RNA, 20 nt, synthetic construct
  source 1..20: mol_type = other RNA
gagatctgcaatccaaataa

SEQ ID NO: 7230 - RNA, 20 nt, synthetic construct
  source 1..20: mol_type = other RNA
gagcaccaaagggatacact

SEQ ID NO: 7231 - RNA, 20 nt, synthetic construct
  source 1..20: mol_type = other RNA
gagtatatcctgttagtgta

SEQ ID NO: 7232 - RNA, 20 nt, synthetic construct
  source 1..20: mol_type = other RNA
gatacactaacaggatatac

SEQ ID NO: 7233 - RNA, 20 nt, synthetic construct
  source 1..20: mol_type = other RNA
gatatactctttataatggg

SEQ ID NO: 7234 - RNA, 20 nt, synthetic construct
  source 1..20: mol_type = other RNA
gatatgatgttttggtcaat

SEQ ID NO: 7235 - RNA, 20 nt, synthetic construct
  source 1..20: mol_type = other RNA
gatcacctttttaaaagaag

SEQ ID NO: 7236 - RNA, 20 nt, synthetic construct
  source 1..20: mol_type = other RNA
gatctacacagtagaaatta

SEQ ID NO: 7237 - RNA, 20 nt, synthetic construct
  source 1..20: mol_type = other RNA
gatctcattaccaaacttgt

SEQ ID NO: 7238 - RNA, 20 nt, synthetic construct
  source 1..20: mol_type = other RNA
gatctgcaatccaaataaaa

SEQ ID NO: 7239 - RNA, 20 nt, synthetic construct
  source 1..20: mol_type = other RNA
gatggactgtatatatgaca

SEQ ID NO: 7240 - RNA, 20 nt, synthetic construct
  source 1..20: mol_type = other RNA
gattgcagatctcattacca

SEQ ID NO: 7241 - RNA, 20 nt, synthetic construct
  source 1..20: mol_type = other RNA
gattttgggagcaccaaagg

SEQ ID NO: 7242 - RNA, 20 nt, synthetic construct
  source 1..20: mol_type = other RNA
gcaccaaagggatacactaa

SEQ ID NO: 7243 - RNA, 20 nt, synthetic construct
  source 1..20: mol_type = other RNA
gcagacagttctccaaaccc

SEQ ID NO: 7244 - RNA, 20 nt, synthetic construct
  source 1..20: mol_type = other RNA
gcagatctcattaccaaact

SEQ ID NO: 7245 - RNA, 20 nt, synthetic construct
  source 1..20: mol_type = other RNA
gcagctacttcttttaaaaa

SEQ ID NO: 7246 - RNA, 20 nt, synthetic construct
  source 1..20: mol_type = other RNA
gcagtaaaaatatgctattt

SEQ ID NO: 7247 - RNA, 20 nt, synthetic construct
  source 1..20: mol_type = other RNA
gcattttttcttctaagatt

SEQ ID NO: 7248 - RNA, 20 nt, synthetic construct
  source 1..20: mol_type = other RNA
gctacttcttttaaaaaggt

SEQ ID NO: 7249 - RNA, 20 nt, synthetic construct
  source 1..20: mol_type = other RNA
gctattttaatcttatgaga

SEQ ID NO: 7250 - RNA, 20 nt, synthetic construct
  source 1..20: mol_type = other RNA
gctcccaaaatcttagaaga

SEQ ID NO: 7251 - RNA, 20 nt, synthetic construct
  source 1..20: mol_type = other RNA
gctgatatgatgttttggtc

SEQ ID NO: 7252 - RNA, 20 nt, synthetic construct
  source 1..20: mol_type = other RNA
gctgcagacagttctccaaa

SEQ ID NO: 7253 - RNA, 20 nt, synthetic construct
  source 1..20: mol_type = other RNA
ggactgtatatatgacagtg

SEQ ID NO: 7254 - RNA, 20 nt, synthetic construct
  source 1..20: mol_type = other RNA
ggagaactgtctgcagctac

SEQ ID NO: 7255 - RNA, 20 nt, synthetic construct
  source 1..20: mol_type = other RNA
ggagcaccaaagggatacac

SEQ ID NO: 7256 - RNA, 20 nt, synthetic construct
  source 1..20: mol_type = other RNA
ggatacactaacaggatata

SEQ ID NO: 7257 - RNA, 20 nt, synthetic construct
  source 1..20: mol_type = other RNA
ggatatactctttataatgg

SEQ ID NO: 7258 - RNA, 20 nt, synthetic construct
  source 1..20: mol_type = other RNA
ggattgcagatctcattacc

SEQ ID NO: 7259 - RNA, 20 nt, synthetic construct
  source 1..20: mol_type = other RNA
gggagcaccaaagggataca

SEQ ID NO: 7260 - RNA, 20 nt, synthetic construct
  source 1..20: mol_type = other RNA
gggatacactaacaggatat

SEQ ID NO: 7261 - RNA, 20 nt, synthetic construct
  source 1..20: mol_type = other RNA
gggtttggagaactgtctgc

SEQ ID NO: 7262 - RNA, 20 nt, synthetic construct
  source 1..20: mol_type = other RNA
ggtaatgagatctgcaatcc

SEQ ID NO: 7263 - RNA, 20 nt, synthetic construct
  source 1..20: mol_type = other RNA
ggtcaatgatggactgtata

SEQ ID NO: 7264 - RNA, 20 nt, synthetic construct
  source 1..20: mol_type = other RNA
ggtctcataagattaaaata

SEQ ID NO: 7265 - RNA, 20 nt, synthetic construct
  source 1..20: mol_type = other RNA
ggtgatctacacagtagaaa

SEQ ID NO: 7266 - RNA, 20 nt, synthetic construct
  source 1..20: mol_type = other RNA
ggtgctcccaaaatcttaga

SEQ ID NO: 7267 - RNA, 20 nt, synthetic construct
  source 1..20: mol_type = other RNA
ggttagcaatgaatttattt

SEQ ID NO: 7268 - RNA, 20 nt, synthetic construct
  source 1..20: mol_type = other RNA
ggtttggagaactgtctgca

SEQ ID NO: 7269 - RNA, 20 nt, synthetic construct
  source 1..20: mol_type = other RNA
gtaatgagatctgcaatcca

SEQ ID NO: 7270 - RNA, 20 nt, synthetic construct
  source 1..20: mol_type = other RNA
gtagaaattagacaagtttg

SEQ ID NO: 7271 - RNA, 20 nt, synthetic construct
  source 1..20: mol_type = other RNA
gtagatcacctttttaaaag

SEQ ID NO: 7272 - RNA, 20 nt, synthetic construct
  source 1..20: mol_type = other RNA
gtagctgcagacagttctcc

SEQ ID NO: 7273 - RNA, 20 nt, synthetic construct
  source 1..20: mol_type = other RNA
gtatatatgacagtggtctc

SEQ ID NO: 7274 - RNA, 20 nt, synthetic construct
  source 1..20: mol_type = other RNA
gtatatcctgttagtgtatc

SEQ ID NO: 7275 - RNA, 20 nt, synthetic construct
  source 1..20: mol_type = other RNA
gtatccctttggtgctccca

SEQ ID NO: 7276 - RNA, 20 nt, synthetic construct
  source 1..20: mol_type = other RNA
gtcaatgatggactgtatat

SEQ ID NO: 7277 - RNA, 20 nt, synthetic construct
  source 1..20: mol_type = other RNA
gtcatatatacagtccatca

SEQ ID NO: 7278 - RNA, 20 nt, synthetic construct
  source 1..20: mol_type = other RNA
gtccatcattgaccaaaaca

SEQ ID NO: 7279 - RNA, 20 nt, synthetic construct
  source 1..20: mol_type = other RNA
gtctaatttctactgtgtag

SEQ ID NO: 7280 - RNA, 20 nt, synthetic construct
  source 1..20: mol_type = other RNA
gtctcataagattaaaatag

SEQ ID NO: 7281 - RNA, 20 nt, synthetic construct
  source 1..20: mol_type = other RNA
gtctgcagctacttctttta

SEQ ID NO: 7282 - RNA, 20 nt, synthetic construct
  source 1..20: mol_type = other RNA
gtgatctacacagtagaaat

SEQ ID NO: 7283 - RNA, 20 nt, synthetic construct
  source 1..20: mol_type = other RNA
gtgctcccaaaatcttagaa

SEQ ID NO: 7284 - RNA, 20 nt, synthetic construct
  source 1..20: mol_type = other RNA
gtggtctcataagattaaaa

SEQ ID NO: 7285 - RNA, 20 nt, synthetic construct
  source 1..20: mol_type = other RNA
gtgtagatcacctttttaaa

SEQ ID NO: 7286 - RNA, 20 nt, synthetic construct
  source 1..20: mol_type = other RNA
gtgtatccctttggtgctcc

SEQ ID NO: 7287 - RNA, 20 nt, synthetic construct
  source 1..20: mol_type = other RNA
gttagtgtatccctttggtg

SEQ ID NO: 7288 - RNA, 20 nt, synthetic construct
  source 1..20: mol_type = other RNA
gttctccaaacccattataa

SEQ ID NO: 7289 - RNA, 20 nt, synthetic construct
  source 1..20: mol_type = other RNA
gttgcagtaaaaatatgcta

SEQ ID NO: 7290 - RNA, 20 nt, synthetic construct
  source 1..20: mol_type = other RNA
gtttggagaactgtctgcag

SEQ ID NO: 7291 - RNA, 20 nt, synthetic construct
  source 1..20: mol_type = other RNA
gtttggtaatgagatctgca

SEQ ID NO: 7292 - RNA, 20 nt, synthetic construct
  source 1..20: mol_type = other RNA
gttttggtcaatgatggact

SEQ ID NO: 7293 - RNA, 20 nt, synthetic construct
  source 1..20: mol_type = other RNA
taaaaaggtgatctacacag

SEQ ID NO: 7294 - RNA, 20 nt, synthetic construct
  source 1..20: mol_type = other RNA
taaaagaagtagctgcagac

SEQ ID NO: 7295 - RNA, 20 nt, synthetic construct
  source 1..20: mol_type = other RNA
taaagagtatatcctgttag

SEQ ID NO: 7296 - RNA, 20 nt, synthetic construct
  source 1..20: mol_type = other RNA
taaattcattgctaaccttt

SEQ ID NO: 7297 - RNA, 20 nt, synthetic construct
  source 1..20: mol_type = other RNA
taacaggatatactctttat

SEQ ID NO: 7298 - RNA, 20 nt, synthetic construct
  source 1..20: mol_type = other RNA
taagattttgggagcaccaa

SEQ ID NO: 7299 - RNA, 20 nt, synthetic construct
  source 1..20: mol_type = other RNA
taatgagatctgcaatccaa

SEQ ID NO: 7300 - RNA, 20 nt, synthetic construct
  source 1..20: mol_type = other RNA
taatgggtttggagaactgt

SEQ ID NO: 7301 - RNA, 20 nt, synthetic construct
  source 1..20: mol_type = other RNA
taatttctactgtgtagatc

SEQ ID NO: 7302 - RNA, 20 nt, synthetic construct
  source 1..20: mol_type = other RNA
tacacagtagaaattagaca

SEQ ID NO: 7303 - RNA, 20 nt, synthetic construct
  source 1..20: mol_type = other RNA
tacactaacaggatatactc

SEQ ID NO: 7304 - RNA, 20 nt, synthetic construct
  source 1..20: mol_type = other RNA
taccaaacttgtctaatttc

SEQ ID NO: 7305 - RNA, 20 nt, synthetic construct
  source 1..20: mol_type = other RNA
tactctttataatgggtttg

SEQ ID NO: 7306 - RNA, 20 nt, synthetic construct
  source 1..20: mol_type = other RNA
tactgtgtagatcacctttt

SEQ ID NO: 7307 - RNA, 20 nt, synthetic construct
  source 1..20: mol_type = other RNA
tacttcttttaaaaaggtga

SEQ ID NO: 7308 - RNA, 20 nt, synthetic construct
  source 1..20: mol_type = other RNA
tagaaattagacaagtttgg

SEQ ID NO: 7309 - RNA, 20 nt, synthetic construct
  source 1..20: mol_type = other RNA
tagaagaaaaaatgctgata

SEQ ID NO: 7310 - RNA, 20 nt, synthetic construct
  source 1..20: mol_type = other RNA
tagacaagtttggtaatgag

SEQ ID NO: 7311 - RNA, 20 nt, synthetic construct
  source 1..20: mol_type = other RNA
tagatcacctttttaaaaga

SEQ ID NO: 7312 - RNA, 20 nt, synthetic construct
  source 1..20: mol_type = other RNA
tagctgcagacagttctcca

SEQ ID NO: 7313 - RNA, 20 nt, synthetic construct
  source 1..20: mol_type = other RNA
tagtgtatccctttggtgct

SEQ ID NO: 7314 - RNA, 20 nt, synthetic construct
  source 1..20: mol_type = other RNA
tataaagagtatatcctgtt

SEQ ID NO: 7315 - RNA, 20 nt, synthetic construct
  source 1..20: mol_type = other RNA
tataatgggtttggagaact

SEQ ID NO: 7316 - RNA, 20 nt, synthetic construct
  source 1..20: mol_type = other RNA
tatactctttataatgggtt

SEQ ID NO: 7317 - RNA, 20 nt, synthetic construct
  source 1..20: mol_type = other RNA
tatatacagtccatcattga

SEQ ID NO: 7318 - RNA, 20 nt, synthetic construct
  source 1..20: mol_type = other RNA
tatatcctgttagtgtatcc

SEQ ID NO: 7319 - RNA, 20 nt, synthetic construct
  source 1..20: mol_type = other RNA
tatcagcattttttcttcta

SEQ ID NO: 7320 - RNA, 20 nt, synthetic construct
  source 1..20: mol_type = other RNA
tatccctttggtgctcccaa

SEQ ID NO: 7321 - RNA, 20 nt, synthetic construct
  source 1..20: mol_type = other RNA
tatcctgttagtgtatccct

SEQ ID NO: 7322 - RNA, 20 nt, synthetic construct
  source 1..20: mol_type = other RNA
tatgagaccactgtcatata

SEQ ID NO: 7323 - RNA, 20 nt, synthetic construct
  source 1..20: mol_type = other RNA
tatgatgttttggtcaatga

SEQ ID NO: 7324 - RNA, 20 nt, synthetic construct
  source 1..20: mol_type = other RNA
tatttggattgcagatctca

SEQ ID NO: 7325 - RNA, 20 nt, synthetic construct
  source 1..20: mol_type = other RNA
tattttaatcttatgagacc

SEQ ID NO: 7326 - RNA, 20 nt, synthetic construct
  source 1..20: mol_type = other RNA
tattttatttggattgcaga

SEQ ID NO: 7327 - RNA, 20 nt, synthetic construct
  source 1..20: mol_type = other RNA
tcaatgatggactgtatata

SEQ ID NO: 7328 - RNA, 20 nt, synthetic construct
  source 1..20: mol_type = other RNA
tcacctttttaaaagaagta

SEQ ID NO: 7329 - RNA, 20 nt, synthetic construct
  source 1..20: mol_type = other RNA
tcagcattttttcttctaag

SEQ ID NO: 7330 - RNA, 20 nt, synthetic construct
  source 1..20: mol_type = other RNA
tcatatatacagtccatcat

SEQ ID NO: 7331 - RNA, 20 nt, synthetic construct
  source 1..20: mol_type = other RNA
tcatatcagcattttttctt

SEQ ID NO: 7332 - RNA, 20 nt, synthetic construct
  source 1..20: mol_type = other RNA
tcattaccaaacttgtctaa

SEQ ID NO: 7333 - RNA, 20 nt, synthetic construct
  source 1..20: mol_type = other RNA
tcattgaccaaaacatcata

SEQ ID NO: 7334 - RNA, 20 nt, synthetic construct
  source 1..20: mol_type = other RNA
tcattgctaacctttttctt

SEQ ID NO: 7335 - RNA, 20 nt, synthetic construct
  source 1..20: mol_type = other RNA
tccaaacccattataaagag

SEQ ID NO: 7336 - RNA, 20 nt, synthetic construct
  source 1..20: mol_type = other RNA
tccatcattgaccaaaacat

SEQ ID NO: 7337 - RNA, 20 nt, synthetic construct
  source 1..20: mol_type = other RNA
tcccaaaatcttagaagaaa

SEQ ID NO: 7338 - RNA, 20 nt, synthetic construct
  source 1..20: mol_type = other RNA
tccctttggtgctcccaaaa

SEQ ID NO: 7339 - RNA, 20 nt, synthetic construct
  source 1..20: mol_type = other RNA
tcctgttagtgtatcccttt

SEQ ID NO: 7340 - RNA, 20 nt, synthetic construct
  source 1..20: mol_type = other RNA
tctaagattttgggagcacc

SEQ ID NO: 7341 - RNA, 20 nt, synthetic construct
  source 1..20: mol_type = other RNA
tctaatttctactgtgtaga

SEQ ID NO: 7342 - RNA, 20 nt, synthetic construct
  source 1..20: mol_type = other RNA
tctacacagtagaaattaga

SEQ ID NO: 7343 - RNA, 20 nt, synthetic construct
  source 1..20: mol_type = other RNA
tctactgtgtagatcacctt

SEQ ID NO: 7344 - RNA, 20 nt, synthetic construct
  source 1..20: mol_type = other RNA
tctcataagattaaaatagc

SEQ ID NO: 7345 - RNA, 20 nt, synthetic construct
  source 1..20: mol_type = other RNA
tctcattaccaaacttgtct

SEQ ID NO: 7346 - RNA, 20 nt, synthetic construct
  source 1..20: mol_type = other RNA
tctccaaacccattataaag

SEQ ID NO: 7347 - RNA, 20 nt, synthetic construct
  source 1..20: mol_type = other RNA
tctgcaatccaaataaaata

SEQ ID NO: 7348 - RNA, 20 nt, synthetic construct
  source 1..20: mol_type = other RNA
tctgcagctacttcttttaa

SEQ ID NO: 7349 - RNA, 20 nt, synthetic construct
  source 1..20: mol_type = other RNA
tcttagaagaaaaaatgctg

SEQ ID NO: 7350 - RNA, 20 nt, synthetic construct
  source 1..20: mol_type = other RNA
tcttatgagaccactgtcat

SEQ ID NO: 7351 - RNA, 20 nt, synthetic construct
  source 1..20: mol_type = other RNA
tcttctaagattttgggagc

SEQ ID NO: 7352 - RNA, 20 nt, synthetic construct
  source 1..20: mol_type = other RNA
tctttataatgggtttggag

SEQ ID NO: 7353 - RNA, 20 nt, synthetic construct
  source 1..20: mol_type = other RNA
tcttttaaaaaggtgatcta

SEQ ID NO: 7354 - RNA, 20 nt, synthetic construct
  source 1..20: mol_type = other RNA
tgaaaagaaaagaaaaaggt

SEQ ID NO: 7355 - RNA, 20 nt, synthetic construct
  source 1..20: mol_type = other RNA
tgacagtggtctcataagat

SEQ ID NO: 7356 - RNA, 20 nt, synthetic construct
  source 1..20: mol_type = other RNA
tgaccaaaacatcatatcag

SEQ ID NO: 7357 - RNA, 20 nt, synthetic construct
  source 1..20: mol_type = other RNA
tgagaccactgtcatatata

SEQ ID NO: 7358 - RNA, 20 nt, synthetic construct
  source 1..20: mol_type = other RNA
tgagatctgcaatccaaata

SEQ ID NO: 7359 - RNA, 20 nt, synthetic construct
  source 1..20: mol_type = other RNA
tgatatgatgttttggtcaa

SEQ ID NO: 7360 - RNA, 20 nt, synthetic construct
  source 1..20: mol_type = other RNA
tgatctacacagtagaaatt

SEQ ID NO: 7361 - RNA, 20 nt, synthetic construct
  source 1..20: mol_type = other RNA
tgatggactgtatatatgac

SEQ ID NO: 7362 - RNA, 20 nt, synthetic construct
  source 1..20: mol_type = other RNA
tgcagacagttctccaaacc

SEQ ID NO: 7363 - RNA, 20 nt, synthetic construct
  source 1..20: mol_type = other RNA
tgcagatctcattaccaaac

SEQ ID NO: 7364 - RNA, 20 nt, synthetic construct
  source 1..20: mol_type = other RNA
tgcagctacttcttttaaaa

SEQ ID NO: 7365 - RNA, 20 nt, synthetic construct
  source 1..20: mol_type = other RNA
tgcagtaaaaatatgctatt

SEQ ID NO: 7366 - RNA, 20 nt, synthetic construct
  source 1..20: mol_type = other RNA
tgctattttaatcttatgag

SEQ ID NO: 7367 - RNA, 20 nt, synthetic construct
  source 1..20: mol_type = other RNA
tgctcccaaaatcttagaag

SEQ ID NO: 7368 - RNA, 20 nt, synthetic construct
  source 1..20: mol_type = other RNA
tgctgatatgatgttttggt

SEQ ID NO: 7369 - RNA, 20 nt, synthetic construct
  source 1..20: mol_type = other RNA
tggactgtatatatgacagt

SEQ ID NO: 7370 - RNA, 20 nt, synthetic construct
  source 1..20: mol_type = other RNA
tggagaactgtctgcagcta

SEQ ID NO: 7371 - RNA, 20 nt, synthetic construct
  source 1..20: mol_type = other RNA
tggattgcagatctcattac

SEQ ID NO: 7372 - RNA, 20 nt, synthetic construct
  source 1..20: mol_type = other RNA
tgggagcaccaaagggatac

SEQ ID NO: 7373 - RNA, 20 nt, synthetic construct
  source 1..20: mol_type = other RNA
tgggtttggagaactgtctg

SEQ ID NO: 7374 - RNA, 20 nt, synthetic construct
  source 1..20: mol_type = other RNA
tggtaatgagatctgcaatc

SEQ ID NO: 7375 - RNA, 20 nt, synthetic construct
  source 1..20: mol_type = other RNA
tggtcaatgatggactgtat

SEQ ID NO: 7376 - RNA, 20 nt, synthetic construct
  source 1..20: mol_type = other RNA
tggtctcataagattaaaat

SEQ ID NO: 7377 - RNA, 20 nt, synthetic construct
  source 1..20: mol_type = other RNA
tggtgctcccaaaatcttag

SEQ ID NO: 7378 - RNA, 20 nt, synthetic construct
  source 1..20: mol_type = other RNA
tgtagatcacctttttaaaa

SEQ ID NO: 7379 - RNA, 20 nt, synthetic construct
  source 1..20: mol_type = other RNA
tgtatatatgacagtggtct

SEQ ID NO: 7380 - RNA, 20 nt, synthetic construct
  source 1..20: mol_type = other RNA
tgtatccctttggtgctccc

SEQ ID NO: 7381 - RNA, 20 nt, synthetic construct
  source 1..20: mol_type = other RNA
tgtcatatatacagtccatc

SEQ ID NO: 7382 - RNA, 20 nt, synthetic construct
  source 1..20: mol_type = other RNA
tgtctaatttctactgtgta

SEQ ID NO: 7383 - RNA, 20 nt, synthetic construct
  source 1..20: mol_type = other RNA
tgtctgcagctacttctttt

SEQ ID NO: 7384 - RNA, 20 nt, synthetic construct
  source 1..20: mol_type = other RNA
tgtgtagatcacctttttaa

SEQ ID NO: 7385 - RNA, 20 nt, synthetic construct
  source 1..20: mol_type = other RNA
tgttagtgtatccctttggt

SEQ ID NO: 7386 - RNA, 20 nt, synthetic construct
  source 1..20: mol_type = other RNA
tgttttggtcaatgatggac

SEQ ID NO: 7387 - RNA, 20 nt, synthetic construct
  source 1..20: mol_type = other RNA
ttaaaaaggtgatctacaca

SEQ ID NO: 7388 - RNA, 20 nt, synthetic construct
  source 1..20: mol_type = other RNA
ttaaaagaagtagctgcaga

SEQ ID NO: 7389 - RNA, 20 nt, synthetic construct
  source 1..20: mol_type = other RNA
ttaccaaacttgtctaattt

SEQ ID NO: 7390 - RNA, 20 nt, synthetic construct
  source 1..20: mol_type = other RNA
ttagaagaaaaaatgctgat

SEQ ID NO: 7391 - RNA, 20 nt, synthetic construct
  source 1..20: mol_type = other RNA
ttagacaagtttggtaatga

SEQ ID NO: 7392 - RNA, 20 nt, synthetic construct
  source 1..20: mol_type = other RNA
ttagtgtatccctttggtgc

SEQ ID NO: 7393 - RNA, 20 nt, synthetic construct
  source 1..20: mol_type = other RNA
ttataaagagtatatcctgt

SEQ ID NO: 7394 - RNA, 20 nt, synthetic construct
  source 1..20: mol_type = other RNA
ttataatgggtttggagaac

SEQ ID NO: 7395 - RNA, 20 nt, synthetic construct
  source 1..20: mol_type = other RNA
ttatgagaccactgtcatat

SEQ ID NO: 7396 - RNA, 20 nt, synthetic construct
  source 1..20: mol_type = other RNA
ttatttggattgcagatctc

SEQ ID NO: 7397 - RNA, 20 nt, synthetic construct
  source 1..20: mol_type = other RNA
ttattttatttggattgcag

SEQ ID NO: 7398 - RNA, 20 nt, synthetic construct
  source 1..20: mol_type = other RNA
ttcattgctaacctttttct

SEQ ID NO: 7399 - RNA, 20 nt, synthetic construct
  source 1..20: mol_type = other RNA
ttctaagattttgggagcac

SEQ ID NO: 7400 - RNA, 20 nt, synthetic construct
  source 1..20: mol_type = other RNA
ttctactgtgtagatcacct

SEQ ID NO: 7401 - RNA, 20 nt, synthetic construct
  source 1..20: mol_type = other RNA
ttctccaaacccattataaa

SEQ ID NO: 7402 - RNA, 20 nt, synthetic construct
  source 1..20: mol_type = other RNA
ttcttctaagattttgggag

SEQ ID NO: 7403 - RNA, 20 nt, synthetic construct
  source 1..20: mol_type = other RNA
ttcttttaaaaaggtgatct

SEQ ID NO: 7404 - RNA, 20 nt, synthetic construct
  source 1..20: mol_type = other RNA
ttgaccaaaacatcatatca

SEQ ID NO: 7405 - RNA, 20 nt, synthetic construct
  source 1..20: mol_type = other RNA
ttgcagatctcattaccaaa

SEQ ID NO: 7406 - RNA, 20 nt, synthetic construct
  source 1..20: mol_type = other RNA
ttgcagtaaaaatatgctat

SEQ ID NO: 7407 - RNA, 20 nt, synthetic construct
  source 1..20: mol_type = other RNA
ttggagaactgtctgcagct

SEQ ID NO: 7408 - RNA, 20 nt, synthetic construct
  source 1..20: mol_type = other RNA
ttggattgcagatctcatta

SEQ ID NO: 7409 - RNA, 20 nt, synthetic construct
  source 1..20: mol_type = other RNA
ttgggagcaccaaagggata

SEQ ID NO: 7410 - RNA, 20 nt, synthetic construct
  source 1..20: mol_type = other RNA
ttggtaatgagatctgcaat

SEQ ID NO: 7411 - RNA, 20 nt, synthetic construct
  source 1..20: mol_type = other RNA
ttggtcaatgatggactgta

SEQ ID NO: 7412 - RNA, 20 nt, synthetic construct
  source 1..20: mol_type = other RNA
ttggtgctcccaaaatctta

SEQ ID NO: 7413 - RNA, 20 nt, synthetic construct
  source 1..20: mol_type = other RNA
ttgtctaatttctactgtgt

SEQ ID NO: 7414 - RNA, 20 nt, synthetic construct
  source 1..20: mol_type = other RNA
tttaaaaaggtgatctacac

SEQ ID NO: 7415 - RNA, 20 nt, synthetic construct
  source 1..20: mol_type = other RNA
tttaaaagaagtagctgcag

SEQ ID NO: 7416 - RNA, 20 nt, synthetic construct
  source 1..20: mol_type = other RNA
tttataatgggtttggagaa

SEQ ID NO: 7417 - RNA, 20 nt, synthetic construct
  source 1..20: mol_type = other RNA
tttatttggattgcagatct

SEQ ID NO: 7418 - RNA, 20 nt, synthetic construct
  source 1..20: mol_type = other RNA
tttctactgtgtagatcacc

SEQ ID NO: 7419 - RNA, 20 nt, synthetic construct
  source 1..20: mol_type = other RNA
tttcttctaagattttggga

SEQ ID NO: 7420 - RNA, 20 nt, synthetic construct
  source 1..20: mol_type = other RNA
tttggagaactgtctgcagc

SEQ ID NO: 7421 - RNA, 20 nt, synthetic construct
  source 1..20: mol_type = other RNA
tttggattgcagatctcatt

SEQ ID NO: 7422 - RNA, 20 nt, synthetic construct
  source 1..20: mol_type = other RNA
tttgggagcaccaaagggat

SEQ ID NO: 7423 - RNA, 20 nt, synthetic construct
  source 1..20: mol_type = other RNA
tttggtaatgagatctgcaa

SEQ ID NO: 7424 - RNA, 20 nt, synthetic construct
  source 1..20: mol_type = other RNA
tttggtcaatgatggactgt

SEQ ID NO: 7425 - RNA, 20 nt, synthetic construct
  source 1..20: mol_type = other RNA
tttggtgctcccaaaatctt

SEQ ID NO: 7426 - RNA, 20 nt, synthetic construct
  source 1..20: mol_type = other RNA
ttttaaaaaggtgatctaca

SEQ ID NO: 7427 - RNA, 20 nt, synthetic construct
  source 1..20: mol_type = other RNA
ttttaaaagaagtagctgca

SEQ ID NO: 7428 - RNA, 20 nt, synthetic construct
  source 1..20: mol_type = other RNA
ttttatttggattgcagatc

SEQ ID NO: 7429 - RNA, 20 nt, synthetic construct
  source 1..20: mol_type = other RNA
ttttcttctaagattttggg

SEQ ID NO: 7430 - RNA, 20 nt, synthetic construct
  source 1..20: mol_type = other RNA
ttttgggagcaccaaaggga

SEQ ID NO: 7431 - RNA, 20 nt, synthetic construct
  source 1..20: mol_type = other RNA
ttttggtcaatgatggactg

SEQ ID NO: 7432 - RNA, 20 nt, synthetic construct
  source 1..20: mol_type = other RNA
tttttaaaagaagtagctgc

SEQ ID NO: 7433 - RNA, 20 nt, synthetic construct
  source 1..20: mol_type = other RNA
tttttcttctaagattttgg

SEQ ID NO: 7434 - RNA, 21 nt, synthetic construct
  source 1..21: mol_type = other RNA
aaaaaggtgatctacacagta

SEQ ID NO: 7435 - RNA, 21 nt, synthetic construct
  source 1..21: mol_type = other RNA
aaaagaaaaaggttagcaatg

SEQ ID NO: 7436 - RNA, 21 nt, synthetic construct
  source 1..21: mol_type = other RNA
aaaagaagtagctgcagacag

SEQ ID NO: 7437 - RNA, 21 nt, synthetic construct
  source 1..21: mol_type = other RNA
aaaaggtgatctacacagtag

SEQ ID NO: 7438 - RNA, 21 nt, synthetic construct
  source 1..21: mol_type = other RNA
aaacttgtctaatttctactg

SEQ ID NO: 7439 - RNA, 21 nt, synthetic construct
  source 1..21: mol_type = other RNA
aaagaaaaaggttagcaatga

SEQ ID NO: 7440 - RNA, 21 nt, synthetic construct
  source 1..21: mol_type = other RNA
aaagaaaagaaaaaggttagc

SEQ ID NO: 7441 - RNA, 21 nt, synthetic construct
  source 1..21: mol_type = other RNA
aaagaagtagctgcagacagt

SEQ ID NO: 7442 - RNA, 21 nt, synthetic construct
  source 1..21: mol_type = other RNA
aaagagtatatcctgttagtg

SEQ ID NO: 7443 - RNA, 21 nt, synthetic construct
  source 1..21: mol_type = other RNA
aaagggatacactaacaggat

SEQ ID NO: 7444 - RNA, 21 nt, synthetic construct
  source 1..21: mol_type = other RNA
aaaggtgatctacacagtaga

SEQ ID NO: 7445 - RNA, 21 nt, synthetic construct
  source 1..21: mol_type = other RNA
aaatgctgatatgatgttttg

SEQ ID NO: 7446 - RNA, 21 nt, synthetic construct
  source 1..21: mol_type = other RNA
aactgtctgcagctacttctt

SEQ ID NO: 7447 - RNA, 21 nt, synthetic construct
  source 1..21: mol_type = other RNA
aacttgtctaatttctactgt

SEQ ID NO: 7448 - RNA, 21 nt, synthetic construct
  source 1..21: mol_type = other RNA
aagaaaaaggttagcaatgaa

SEQ ID NO: 7449 - RNA, 21 nt, synthetic construct
  source 1..21: mol_type = other RNA
aagaaaagaaaaaggttagca

SEQ ID NO: 7450 - RNA, 21 nt, synthetic construct
  source 1..21: mol_type = other RNA
aagaagtagctgcagacagtt

SEQ ID NO: 7451 - RNA, 21 nt, synthetic construct
  source 1..21: mol_type = other RNA
aagagtatatcctgttagtgt

SEQ ID NO: 7452 - RNA, 21 nt, synthetic construct
  source 1..21: mol_type = other RNA
aagattttgggagcaccaaag

SEQ ID NO: 7453 - RNA, 21 nt, synthetic construct
  source 1..21: mol_type = other RNA
aagggatacactaacaggata

SEQ ID NO: 7454 - RNA, 21 nt, synthetic construct
  source 1..21: mol_type = other RNA
aaggtgatctacacagtagaa

SEQ ID NO: 7455 - RNA, 21 nt, synthetic construct
  source 1..21: mol_type = other RNA
aagtagctgcagacagttctc

SEQ ID NO: 7456 - RNA, 21 nt, synthetic construct
  source 1..21: mol_type = other RNA
aagtttggtaatgagatctgc

SEQ ID NO: 7457 - RNA, 21 nt, synthetic construct
  source 1..21: mol_type = other RNA
aatcttatgagaccactgtca

SEQ ID NO: 7458 - RNA, 21 nt, synthetic construct
  source 1..21: mol_type = other RNA
aatgagatctgcaatccaaat

SEQ ID NO: 7459 - RNA, 21 nt, synthetic construct
  source 1..21: mol_type = other RNA
aatgatggactgtatatatga

SEQ ID NO: 7460 - RNA, 21 nt, synthetic construct
  source 1..21: mol_type = other RNA
aatgctgatatgatgttttgg

SEQ ID NO: 7461 - RNA, 21 nt, synthetic construct
  source 1..21: mol_type = other RNA
aatgggtttggagaactgtct

SEQ ID NO: 7462 - RNA, 21 nt, synthetic construct
  source 1..21: mol_type = other RNA
aattagacaagtttggtaatg

SEQ ID NO: 7463 - RNA, 21 nt, synthetic construct
  source 1..21: mol_type = other RNA
aattcattgctaacctttttc

SEQ ID NO: 7464 - RNA, 21 nt, synthetic construct
  source 1..21: mol_type = other RNA
aatttctactgtgtagatcac

SEQ ID NO: 7465 - RNA, 21 nt, synthetic construct
  source 1..21: mol_type = other RNA
acaagtttggtaatgagatct

SEQ ID NO: 7466 - RNA, 21 nt, synthetic construct
  source 1..21: mol_type = other RNA
acacagtagaaattagacaag

SEQ ID NO: 7467 - RNA, 21 nt, synthetic construct
  source 1..21: mol_type = other RNA
acactaacaggatatactctt

SEQ ID NO: 7468 - RNA, 21 nt, synthetic construct
  source 1..21: mol_type = other RNA
acagtagaaattagacaagtt

SEQ ID NO: 7469 - RNA, 21 nt, synthetic construct
  source 1..21: mol_type = other RNA
acagtccatcattgaccaaaa

SEQ ID NO: 7470 - RNA, 21 nt, synthetic construct
  source 1..21: mol_type = other RNA
acagtggtctcataagattaa

SEQ ID NO: 7471 - RNA, 21 nt, synthetic construct
  source 1..21: mol_type = other RNA
acagttctccaaacccattat

SEQ ID NO: 7472 - RNA, 21 nt, synthetic construct
  source 1..21: mol_type = other RNA
acatcatatcagcattttttc

SEQ ID NO: 7473 - RNA, 21 nt, synthetic construct
  source 1..21: mol_type = other RNA
accaaaacatcatatcagcat

SEQ ID NO: 7474 - RNA, 21 nt, synthetic construct
  source 1..21: mol_type = other RNA
accaaacttgtctaatttcta

SEQ ID NO: 7475 - RNA, 21 nt, synthetic construct
  source 1..21: mol_type = other RNA
accaaagggatacactaacag

SEQ ID NO: 7476 - RNA, 21 nt, synthetic construct
  source 1..21: mol_type = other RNA
accactgtcatatatacagtc

SEQ ID NO: 7477 - RNA, 21 nt, synthetic construct
  source 1..21: mol_type = other RNA
acccattataaagagtatatc

SEQ ID NO: 7478 - RNA, 21 nt, synthetic construct
  source 1..21: mol_type = other RNA
acctttttaaaagaagtagct

SEQ ID NO: 7479 - RNA, 21 nt, synthetic construct
  source 1..21: mol_type = other RNA
actaacaggatatactcttta

SEQ ID NO: 7480 - RNA, 21 nt, synthetic construct
  source 1..21: mol_type = other RNA
actctttataatgggtttgga

SEQ ID NO: 7481 - RNA, 21 nt, synthetic construct
  source 1..21: mol_type = other RNA
actgtatatatgacagtggtc

SEQ ID NO: 7482 - RNA, 21 nt, synthetic construct
  source 1..21: mol_type = other RNA
actgtcatatatacagtccat

SEQ ID NO: 7483 - RNA, 21 nt, synthetic construct
  source 1..21: mol_type = other RNA
actgtctgcagctacttcttt

SEQ ID NO: 7484 - RNA, 21 nt, synthetic construct
  source 1..21: mol_type = other RNA
actgtgtagatcaccttttta

SEQ ID NO: 7485 - RNA, 21 nt, synthetic construct
  source 1..21: mol_type = other RNA
acttcttttaaaaaggtgatc

SEQ ID NO: 7486 - RNA, 21 nt, synthetic construct
  source 1..21: mol_type = other RNA
acttgtctaatttctactgtg

SEQ ID NO: 7487 - RNA, 21 nt, synthetic construct
  source 1..21: mol_type = other RNA
agaaaaaatgctgatatgatg

SEQ ID NO: 7488 - RNA, 21 nt, synthetic construct
  source 1..21: mol_type = other RNA
agaaaaaggttagcaatgaat

SEQ ID NO: 7489 - RNA, 21 nt, synthetic construct
  source 1..21: mol_type = other RNA
agaaaagaaaaaggttagcaa

SEQ ID NO: 7490 - RNA, 21 nt, synthetic construct
  source 1..21: mol_type = other RNA
agaaattagacaagtttggta

SEQ ID NO: 7491 - RNA, 21 nt, synthetic construct
  source 1..21: mol_type = other RNA
agaactgtctgcagctacttc

SEQ ID NO: 7492 - RNA, 21 nt, synthetic construct
  source 1..21: mol_type = other RNA
agaagaaaaaatgctgatatg

SEQ ID NO: 7493 - RNA, 21 nt, synthetic construct
  source 1..21: mol_type = other RNA
agaagtagctgcagacagttc

SEQ ID NO: 7494 - RNA, 21 nt, synthetic construct
  source 1..21: mol_type = other RNA
agacaagtttggtaatgagat

SEQ ID NO: 7495 - RNA, 21 nt, synthetic construct
  source 1..21: mol_type = other RNA
agacagttctccaaacccatt

SEQ ID NO: 7496 - RNA, 21 nt, synthetic construct
  source 1..21: mol_type = other RNA
agaccactgtcatatatacag

SEQ ID NO: 7497 - RNA, 21 nt, synthetic construct
  source 1..21: mol_type = other RNA
agagtatatcctgttagtgta

SEQ ID NO: 7498 - RNA, 21 nt, synthetic construct
  source 1..21: mol_type = other RNA
agatcacctttttaaaagaag

SEQ ID NO: 7499 - RNA, 21 nt, synthetic construct
  source 1..21: mol_type = other RNA
agatctcattaccaaacttgt

SEQ ID NO: 7500 - RNA, 21 nt, synthetic construct
  source 1..21: mol_type = other RNA
agatctgcaatccaaataaaa

SEQ ID NO: 7501 - RNA, 21 nt, synthetic construct
  source 1..21: mol_type = other RNA
agattttgggagcaccaaagg

SEQ ID NO: 7502 - RNA, 21 nt, synthetic construct
  source 1..21: mol_type = other RNA
agcaccaaagggatacactaa

SEQ ID NO: 7503 - RNA, 21 nt, synthetic construct
  source 1..21: mol_type = other RNA
agctacttcttttaaaaaggt

SEQ ID NO: 7504 - RNA, 21 nt, synthetic construct
  source 1..21: mol_type = other RNA
agctgcagacagttctccaaa

SEQ ID NO: 7505 - RNA, 21 nt, synthetic construct
  source 1..21: mol_type = other RNA
aggatatactctttataatgg

SEQ ID NO: 7506 - RNA, 21 nt, synthetic construct
  source 1..21: mol_type = other RNA
agggatacactaacaggatat

SEQ ID NO: 7507 - RNA, 21 nt, synthetic construct
  source 1..21: mol_type = other RNA
aggtgatctacacagtagaaa

SEQ ID NO: 7508 - RNA, 21 nt, synthetic construct
  source 1..21: mol_type = other RNA
agtagaaattagacaagtttg

SEQ ID NO: 7509 - RNA, 21 nt, synthetic construct
  source 1..21: mol_type = other RNA
agtagctgcagacagttctcc

SEQ ID NO: 7510 - RNA, 21 nt, synthetic construct
  source 1..21: mol_type = other RNA
agtatatcctgttagtgtatc

SEQ ID NO: 7511 - RNA, 21 nt, synthetic construct
  source 1..21: mol_type = other RNA
agtccatcattgaccaaaaca

SEQ ID NO: 7512 - RNA, 21 nt, synthetic construct
  source 1..21: mol_type = other RNA
agtggtctcataagattaaaa

SEQ ID NO: 7513 - RNA, 21 nt, synthetic construct
  source 1..21: mol_type = other RNA
agtgtatccctttggtgctcc

SEQ ID NO: 7514 - RNA, 21 nt, synthetic construct
  source 1..21: mol_type = other RNA
agttctccaaacccattataa

SEQ ID NO: 7515 - RNA, 21 nt, synthetic construct
  source 1..21: mol_type = other RNA
agtttggtaatgagatctgca

SEQ ID NO: 7516 - RNA, 21 nt, synthetic construct
  source 1..21: mol_type = other RNA
ataaagagtatatcctgttag

SEQ ID NO: 7517 - RNA, 21 nt, synthetic construct
  source 1..21: mol_type = other RNA
ataatgggtttggagaactgt

SEQ ID NO: 7518 - RNA, 21 nt, synthetic construct
  source 1..21: mol_type = other RNA
atacactaacaggatatactc

SEQ ID NO: 7519 - RNA, 21 nt, synthetic construct
  source 1..21: mol_type = other RNA
atactctttataatgggtttg

SEQ ID NO: 7520 - RNA, 21 nt, synthetic construct
  source 1..21: mol_type = other RNA
atatacagtccatcattgacc

SEQ ID NO: 7521 - RNA, 21 nt, synthetic construct
  source 1..21: mol_type = other RNA
atatatacagtccatcattga

SEQ ID NO: 7522 - RNA, 21 nt, synthetic construct
  source 1..21: mol_type = other RNA
atatcctgttagtgtatccct

SEQ ID NO: 7523 - RNA, 21 nt, synthetic construct
  source 1..21: mol_type = other RNA
atatgatgttttggtcaatga

SEQ ID NO: 7524 - RNA, 21 nt, synthetic construct
  source 1..21: mol_type = other RNA
atcagcattttttcttctaag

SEQ ID NO: 7525 - RNA, 21 nt, synthetic construct
  source 1..21: mol_type = other RNA
atcattgaccaaaacatcata

SEQ ID NO: 7526 - RNA, 21 nt, synthetic construct
  source 1..21: mol_type = other RNA
atccctttggtgctcccaaaa

SEQ ID NO: 7527 - RNA, 21 nt, synthetic construct
  source 1..21: mol_type = other RNA
atcctgttagtgtatcccttt

SEQ ID NO: 7528 - RNA, 21 nt, synthetic construct
  source 1..21: mol_type = other RNA
atctacacagtagaaattaga

SEQ ID NO: 7529 - RNA, 21 nt, synthetic construct
  source 1..21: mol_type = other RNA
atctcattaccaaacttgtct

SEQ ID NO: 7530 - RNA, 21 nt, synthetic construct
  source 1..21: mol_type = other RNA
atcttagaagaaaaaatgctg

SEQ ID NO: 7531 - RNA, 21 nt, synthetic construct
  source 1..21: mol_type = other RNA
atcttatgagaccactgtcat

SEQ ID NO: 7532 - RNA, 21 nt, synthetic construct
  source 1..21: mol_type = other RNA
atgacagtggtctcataagat

SEQ ID NO: 7533 - RNA, 21 nt, synthetic construct
  source 1..21: mol_type = other RNA
atgagaccactgtcatatata

SEQ ID NO: 7534 - RNA, 21 nt, synthetic construct
  source 1..21: mol_type = other RNA
atgagatctgcaatccaaata

SEQ ID NO: 7535 - RNA, 21 nt, synthetic construct
  source 1..21: mol_type = other RNA
atgatggactgtatatatgac

SEQ ID NO: 7536 - RNA, 21 nt, synthetic construct
  source 1..21: mol_type = other RNA
atgctgatatgatgttttggt

SEQ ID NO: 7537 - RNA, 21 nt, synthetic construct
  source 1..21: mol_type = other RNA
atggactgtatatatgacagt

SEQ ID NO: 7538 - RNA, 21 nt, synthetic construct
  source 1..21: mol_type = other RNA
atgggtttggagaactgtctg

SEQ ID NO: 7539 - RNA, 21 nt, synthetic construct
  source 1..21: mol_type = other RNA
atgttttggtcaatgatggac

SEQ ID NO: 7540 - RNA, 21 nt, synthetic construct
  source 1..21: mol_type = other RNA
attagacaagtttggtaatga

SEQ ID NO: 7541 - RNA, 21 nt, synthetic construct
  source 1..21: mol_type = other RNA
attcattgctaacctttttct

SEQ ID NO: 7542 - RNA, 21 nt, synthetic construct
  source 1..21: mol_type = other RNA
attgaccaaaacatcatatca

SEQ ID NO: 7543 - RNA, 21 nt, synthetic construct
  source 1..21: mol_type = other RNA
attgcagatctcattaccaaa

SEQ ID NO: 7544 - RNA, 21 nt, synthetic construct
  source 1..21: mol_type = other RNA
atttctactgtgtagatcacc

SEQ ID NO: 7545 - RNA, 21 nt, synthetic construct
  source 1..21: mol_type = other RNA
atttggattgcagatctcatt

SEQ ID NO: 7546 - RNA, 21 nt, synthetic construct
  source 1..21: mol_type = other RNA
attttatttggattgcagatc

SEQ ID NO: 7547 - RNA, 21 nt, synthetic construct
  source 1..21: mol_type = other RNA
attttgggagcaccaaaggga

SEQ ID NO: 7548 - RNA, 21 nt, synthetic construct
  source 1..21: mol_type = other RNA
caaaacatcatatcagcattt

SEQ ID NO: 7549 - RNA, 21 nt, synthetic construct
  source 1..21: mol_type = other RNA
caaacccattataaagagtat

SEQ ID NO: 7550 - RNA, 21 nt, synthetic construct
  source 1..21: mol_type = other RNA
caaacttgtctaatttctact

SEQ ID NO: 7551 - RNA, 21 nt, synthetic construct
  source 1..21: mol_type = other RNA
caaagggatacactaacagga

SEQ ID NO: 7552 - RNA, 21 nt, synthetic construct
  source 1..21: mol_type = other RNA
caagtttggtaatgagatctg

SEQ ID NO: 7553 - RNA, 21 nt, synthetic construct
  source 1..21: mol_type = other RNA
caatgatggactgtatatatg

SEQ ID NO: 7554 - RNA, 21 nt, synthetic construct
  source 1..21: mol_type = other RNA
cacagtagaaattagacaagt

SEQ ID NO: 7555 - RNA, 21 nt, synthetic construct
  source 1..21: mol_type = other RNA
caccaaagggatacactaaca

SEQ ID NO: 7556 - RNA, 21 nt, synthetic construct
  source 1..21: mol_type = other RNA
cacctttttaaaagaagtagc

SEQ ID NO: 7557 - RNA, 21 nt, synthetic construct
  source 1..21: mol_type = other RNA
cactaacaggatatactcttt

SEQ ID NO: 7558 - RNA, 21 nt, synthetic construct
  source 1..21: mol_type = other RNA
cactgtcatatatacagtcca

SEQ ID NO: 7559 - RNA, 21 nt, synthetic construct
  source 1..21: mol_type = other RNA
cagacagttctccaaacccat

SEQ ID NO: 7560 - RNA, 21 nt, synthetic construct
  source 1..21: mol_type = other RNA
cagatctcattaccaaacttg

SEQ ID NO: 7561 - RNA, 21 nt, synthetic construct
  source 1..21: mol_type = other RNA
cagcattttttcttctaagat

SEQ ID NO: 7562 - RNA, 21 nt, synthetic construct
  source 1..21: mol_type = other RNA
cagctacttcttttaaaaagg

SEQ ID NO: 7563 - RNA, 21 nt, synthetic construct
  source 1..21: mol_type = other RNA
caggatatactctttataatg

SEQ ID NO: 7564 - RNA, 21 nt, synthetic construct
  source 1..21: mol_type = other RNA
cagtagaaattagacaagttt

SEQ ID NO: 7565 - RNA, 21 nt, synthetic construct
  source 1..21: mol_type = other RNA
cagtccatcattgaccaaaac

SEQ ID NO: 7566 - RNA, 21 nt, synthetic construct
  source 1..21: mol_type = other RNA
cagtggtctcataagattaaa

SEQ ID NO: 7567 - RNA, 21 nt, synthetic construct
  source 1..21: mol_type = other RNA
cagttctccaaacccattata

SEQ ID NO: 7568 - RNA, 21 nt, synthetic construct
  source 1..21: mol_type = other RNA
catatatacagtccatcattg

SEQ ID NO: 7569 - RNA, 21 nt, synthetic construct
  source 1..21: mol_type = other RNA
catatcagcattttttcttct

SEQ ID NO: 7570 - RNA, 21 nt, synthetic construct
  source 1..21: mol_type = other RNA
catcatatcagcattttttct

SEQ ID NO: 7571 - RNA, 21 nt, synthetic construct
  source 1..21: mol_type = other RNA
catcattgaccaaaacatcat

SEQ ID NO: 7572 - RNA, 21 nt, synthetic construct
  source 1..21: mol_type = other RNA
cattaccaaacttgtctaatt

SEQ ID NO: 7573 - RNA, 21 nt, synthetic construct
  source 1..21: mol_type = other RNA
cattataaagagtatatcctg

SEQ ID NO: 7574 - RNA, 21 nt, synthetic construct
  source 1..21: mol_type = other RNA
cattgaccaaaacatcatatc

SEQ ID NO: 7575 - RNA, 21 nt, synthetic construct
  source 1..21: mol_type = other RNA
cattgctaacctttttctttt

SEQ ID NO: 7576 - RNA, 21 nt, synthetic construct
  source 1..21: mol_type = other RNA
ccaaaacatcatatcagcatt

SEQ ID NO: 7577 - RNA, 21 nt, synthetic construct
  source 1..21: mol_type = other RNA
ccaaacccattataaagagta

SEQ ID NO: 7578 - RNA, 21 nt, synthetic construct
  source 1..21: mol_type = other RNA
ccaaacttgtctaatttctac

SEQ ID NO: 7579 - RNA, 21 nt, synthetic construct
  source 1..21: mol_type = other RNA
ccaaagggatacactaacagg

SEQ ID NO: 7580 - RNA, 21 nt, synthetic construct
  source 1..21: mol_type = other RNA
ccactgtcatatatacagtcc

SEQ ID NO: 7581 - RNA, 21 nt, synthetic construct
  source 1..21: mol_type = other RNA
ccatcattgaccaaaacatca

SEQ ID NO: 7582 - RNA, 21 nt, synthetic construct
  source 1..21: mol_type = other RNA
ccattataaagagtatatcct

SEQ ID NO: 7583 - RNA, 21 nt, synthetic construct
  source 1..21: mol_type = other RNA
cccaaaatcttagaagaaaaa

SEQ ID NO: 7584 - RNA, 21 nt, synthetic construct
  source 1..21: mol_type = other RNA
cccattataaagagtatatcc

SEQ ID NO: 7585 - RNA, 21 nt, synthetic construct
  source 1..21: mol_type = other RNA
ccctttggtgctcccaaaatc

SEQ ID NO: 7586 - RNA, 21 nt, synthetic construct
  source 1..21: mol_type = other RNA
cctgttagtgtatccctttgg

SEQ ID NO: 7587 - RNA, 21 nt, synthetic construct
  source 1..21: mol_type = other RNA
cctttggtgctcccaaaatct

SEQ ID NO: 7588 - RNA, 21 nt, synthetic construct
  source 1..21: mol_type = other RNA
cctttttaaaagaagtagctg

SEQ ID NO: 7589 - RNA, 21 nt, synthetic construct
  source 1..21: mol_type = other RNA
ctaacaggatatactctttat

SEQ ID NO: 7590 - RNA, 21 nt, synthetic construct
  source 1..21: mol_type = other RNA
ctaagattttgggagcaccaa

SEQ ID NO: 7591 - RNA, 21 nt, synthetic construct
  source 1..21: mol_type = other RNA
ctaatttctactgtgtagatc

SEQ ID NO: 7592 - RNA, 21 nt, synthetic construct
  source 1..21: mol_type = other RNA
ctacacagtagaaattagaca

SEQ ID NO: 7593 - RNA, 21 nt, synthetic construct
  source 1..21: mol_type = other RNA
ctactgtgtagatcacctttt

SEQ ID NO: 7594 - RNA, 21 nt, synthetic construct
  source 1..21: mol_type = other RNA
ctacttcttttaaaaaggtga

SEQ ID NO: 7595 - RNA, 21 nt, synthetic construct
  source 1..21: mol_type = other RNA
ctattttaatcttatgagacc

SEQ ID NO: 7596 - RNA, 21 nt, synthetic construct
  source 1..21: mol_type = other RNA
ctcattaccaaacttgtctaa

SEQ ID NO: 7597 - RNA, 21 nt, synthetic construct
  source 1..21: mol_type = other RNA
ctccaaacccattataaagag

SEQ ID NO: 7598 - RNA, 21 nt, synthetic construct
  source 1..21: mol_type = other RNA
ctcccaaaatcttagaagaaa

SEQ ID NO: 7599 - RNA, 21 nt, synthetic construct
  source 1..21: mol_type = other RNA
ctctttataatgggtttggag

SEQ ID NO: 7600 - RNA, 21 nt, synthetic construct
  source 1..21: mol_type = other RNA
ctgaaaagaaaagaaaaaggt

SEQ ID NO: 7601 - RNA, 21 nt, synthetic construct
  source 1..21: mol_type = other RNA
ctgatatgatgttttggtcaa

SEQ ID NO: 7602 - RNA, 21 nt, synthetic construct
  source 1..21: mol_type = other RNA
ctgcagacagttctccaaacc

SEQ ID NO: 7603 - RNA, 21 nt, synthetic construct
  source 1..21: mol_type = other RNA
ctgcagctacttcttttaaaa

SEQ ID NO: 7604 - RNA, 21 nt, synthetic construct
  source 1..21: mol_type = other RNA
ctgtatatatgacagtggtct

SEQ ID NO: 7605 - RNA, 21 nt, synthetic construct
  source 1..21: mol_type = other RNA
ctgtcatatatacagtccatc

SEQ ID NO: 7606 - RNA, 21 nt, synthetic construct
  source 1..21: mol_type = other RNA
ctgtctgcagctacttctttt

SEQ ID NO: 7607 - RNA, 21 nt, synthetic construct
  source 1..21: mol_type = other RNA
ctgtgtagatcacctttttaa

SEQ ID NO: 7608 - RNA, 21 nt, synthetic construct
  source 1..21: mol_type = other RNA
ctgttagtgtatccctttggt

SEQ ID NO: 7609 - RNA, 21 nt, synthetic construct
  source 1..21: mol_type = other RNA
cttagaagaaaaaatgctgat

SEQ ID NO: 7610 - RNA, 21 nt, synthetic construct
  source 1..21: mol_type = other RNA
cttatgagaccactgtcatat

SEQ ID NO: 7611 - RNA, 21 nt, synthetic construct
  source 1..21: mol_type = other RNA
cttctaagattttgggagcac

SEQ ID NO: 7612 - RNA, 21 nt, synthetic construct
  source 1..21: mol_type = other RNA
cttcttttaaaaaggtgatct

SEQ ID NO: 7613 - RNA, 21 nt, synthetic construct
  source 1..21: mol_type = other RNA
cttgtctaatttctactgtgt

SEQ ID NO: 7614 - RNA, 21 nt, synthetic construct
  source 1..21: mol_type = other RNA
ctttataatgggtttggagaa

SEQ ID NO: 7615 - RNA, 21 nt, synthetic construct
  source 1..21: mol_type = other RNA
ctttggtgctcccaaaatctt

SEQ ID NO: 7616 - RNA, 21 nt, synthetic construct
  source 1..21: mol_type = other RNA
cttttaaaaaggtgatctaca

SEQ ID NO: 7617 - RNA, 21 nt, synthetic construct
  source 1..21: mol_type = other RNA
ctttttaaaagaagtagctgc

SEQ ID NO: 7618 - RNA, 21 nt, synthetic construct
  source 1..21: mol_type = other RNA
gaaaaaatgctgatatgatgt

SEQ ID NO: 7619 - RNA, 21 nt, synthetic construct
  source 1..21: mol_type = other RNA
gaaaaaggttagcaatgaatt

SEQ ID NO: 7620 - RNA, 21 nt, synthetic construct
  source 1..21: mol_type = other RNA
gaaaagaaaaaggttagcaat

SEQ ID NO: 7621 - RNA, 21 nt, synthetic construct
  source 1..21: mol_type = other RNA
gaaattagacaagtttggtaa

SEQ ID NO: 7622 - RNA, 21 nt, synthetic construct
  source 1..21: mol_type = other RNA
gaactgtctgcagctacttct

SEQ ID NO: 7623 - RNA, 21 nt, synthetic construct
  source 1..21: mol_type = other RNA
gaagaaaaaatgctgatatga

SEQ ID NO: 7624 - RNA, 21 nt, synthetic construct
  source 1..21: mol_type = other RNA
gaagtagctgcagacagttct

SEQ ID NO: 7625 - RNA, 21 nt, synthetic construct
  source 1..21: mol_type = other RNA
gacaagtttggtaatgagatc

SEQ ID NO: 7626 - RNA, 21 nt, synthetic construct
  source 1..21: mol_type = other RNA
gacagtggtctcataagatta

SEQ ID NO: 7627 - RNA, 21 nt, synthetic construct
  source 1..21: mol_type = other RNA
gacagttctccaaacccatta

SEQ ID NO: 7628 - RNA, 21 nt, synthetic construct
  source 1..21: mol_type = other RNA
gaccaaaacatcatatcagca

SEQ ID NO: 7629 - RNA, 21 nt, synthetic construct
  source 1..21: mol_type = other RNA
gaccactgtcatatatacagt

SEQ ID NO: 7630 - RNA, 21 nt, synthetic construct
  source 1..21: mol_type = other RNA
gactgtatatatgacagtggt

SEQ ID NO: 7631 - RNA, 21 nt, synthetic construct
  source 1..21: mol_type = other RNA
gagaactgtctgcagctactt

SEQ ID NO: 7632 - RNA, 21 nt, synthetic construct
  source 1..21: mol_type = other RNA
gagaccactgtcatatataca

SEQ ID NO: 7633 - RNA, 21 nt, synthetic construct
  source 1..21: mol_type = other RNA
gagatctgcaatccaaataaa

SEQ ID NO: 7634 - RNA, 21 nt, synthetic construct
  source 1..21: mol_type = other RNA
gagcaccaaagggatacacta

SEQ ID NO: 7635 - RNA, 21 nt, synthetic construct
  source 1..21: mol_type = other RNA
gagtatatcctgttagtgtat

SEQ ID NO: 7636 - RNA, 21 nt, synthetic construct
  source 1..21: mol_type = other RNA
gatacactaacaggatatact

SEQ ID NO: 7637 - RNA, 21 nt, synthetic construct
  source 1..21: mol_type = other RNA
gatatactctttataatgggt

SEQ ID NO: 7638 - RNA, 21 nt, synthetic construct
  source 1..21: mol_type = other RNA
gatatgatgttttggtcaatg

SEQ ID NO: 7639 - RNA, 21 nt, synthetic construct
  source 1..21: mol_type = other RNA
gatcacctttttaaaagaagt

SEQ ID NO: 7640 - RNA, 21 nt, synthetic construct
  source 1..21: mol_type = other RNA
gatctacacagtagaaattag

SEQ ID NO: 7641 - RNA, 21 nt, synthetic construct
  source 1..21: mol_type = other RNA
gatctcattaccaaacttgtc

SEQ ID NO: 7642 - RNA, 21 nt, synthetic construct
  source 1..21: mol_type = other RNA
gatctgcaatccaaataaaat

SEQ ID NO: 7643 - RNA, 21 nt, synthetic construct
  source 1..21: mol_type = other RNA
gatggactgtatatatgacag

SEQ ID NO: 7644 - RNA, 21 nt, synthetic construct
  source 1..21: mol_type = other RNA
gatgttttggtcaatgatgga

SEQ ID NO: 7645 - RNA, 21 nt, synthetic construct
  source 1..21: mol_type = other RNA
gattgcagatctcattaccaa

SEQ ID NO: 7646 - RNA, 21 nt, synthetic construct
  source 1..21: mol_type = other RNA
gattttgggagcaccaaaggg

SEQ ID NO: 7647 - RNA, 21 nt, synthetic construct
  source 1..21: mol_type = other RNA
gcaccaaagggatacactaac

SEQ ID NO: 7648 - RNA, 21 nt, synthetic construct
  source 1..21: mol_type = other RNA
gcagacagttctccaaaccca

SEQ ID NO: 7649 - RNA, 21 nt, synthetic construct
  source 1..21: mol_type = other RNA
gcagatctcattaccaaactt

SEQ ID NO: 7650 - RNA, 21 nt, synthetic construct
  source 1..21: mol_type = other RNA
gcagctacttcttttaaaaag

SEQ ID NO: 7651 - RNA, 21 nt, synthetic construct
  source 1..21: mol_type = other RNA
gctacttcttttaaaaaggtg

SEQ ID NO: 7652 - RNA, 21 nt, synthetic construct
  source 1..21: mol_type = other RNA
gctattttaatcttatgagac

SEQ ID NO: 7653 - RNA, 21 nt, synthetic construct
  source 1..21: mol_type = other RNA
gctcccaaaatcttagaagaa

SEQ ID NO: 7654 - RNA, 21 nt, synthetic construct
  source 1..21: mol_type = other RNA
gctgatatgatgttttggtca

SEQ ID NO: 7655 - RNA, 21 nt, synthetic construct
  source 1..21: mol_type = other RNA
gctgcagacagttctccaaac

SEQ ID NO: 7656 - RNA, 21 nt, synthetic construct
  source 1..21: mol_type = other RNA
ggactgtatatatgacagtgg

SEQ ID NO: 7657 - RNA, 21 nt, synthetic construct
  source 1..21: mol_type = other RNA
ggagaactgtctgcagctact

SEQ ID NO: 7658 - RNA, 21 nt, synthetic construct
  source 1..21: mol_type = other RNA
ggagcaccaaagggatacact

SEQ ID NO: 7659 - RNA, 21 nt, synthetic construct
  source 1..21: mol_type = other RNA
ggatacactaacaggatatac

SEQ ID NO: 7660 - RNA, 21 nt, synthetic construct
  source 1..21: mol_type = other RNA
ggatatactctttataatggg

SEQ ID NO: 7661 - RNA, 21 nt, synthetic construct
  source 1..21: mol_type = other RNA
ggattgcagatctcattacca

SEQ ID NO: 7662 - RNA, 21 nt, synthetic construct
  source 1..21: mol_type = other RNA
gggagcaccaaagggatacac

SEQ ID NO: 7663 - RNA, 21 nt, synthetic construct
  source 1..21: mol_type = other RNA
gggatacactaacaggatata

SEQ ID NO: 7664 - RNA, 21 nt, synthetic construct
  source 1..21: mol_type = other RNA
gggtttggagaactgtctgca

SEQ ID NO: 7665 - RNA, 21 nt, synthetic construct
  source 1..21: mol_type = other RNA
ggtaatgagatctgcaatcca

SEQ ID NO: 7666 - RNA, 21 nt, synthetic construct
  source 1..21: mol_type = other RNA
ggtcaatgatggactgtatat

SEQ ID NO: 7667 - RNA, 21 nt, synthetic construct
  source 1..21: mol_type = other RNA
ggtctcataagattaaaatag

SEQ ID NO: 7668 - RNA, 21 nt, synthetic construct
  source 1..21: mol_type = other RNA
ggtgatctacacagtagaaat

SEQ ID NO: 7669 - RNA, 21 nt, synthetic construct
  source 1..21: mol_type = other RNA
ggtgctcccaaaatcttagaa

SEQ ID NO: 7670 - RNA, 21 nt, synthetic construct
  source 1..21: mol_type = other RNA
ggtttggagaactgtctgcag

SEQ ID NO: 7671 - RNA, 21 nt, synthetic construct
  source 1..21: mol_type = other RNA
gtaatgagatctgcaatccaa

SEQ ID NO: 7672 - RNA, 21 nt, synthetic construct
  source 1..21: mol_type = other RNA
gtagaaattagacaagtttgg

SEQ ID NO: 7673 - RNA, 21 nt, synthetic construct
  source 1..21: mol_type = other RNA
gtagatcacctttttaaaaga

SEQ ID NO: 7674 - RNA, 21 nt, synthetic construct
  source 1..21: mol_type = other RNA
gtagctgcagacagttctcca

SEQ ID NO: 7675 - RNA, 21 nt, synthetic construct
  source 1..21: mol_type = other RNA
gtatatatgacagtggtctca

SEQ ID NO: 7676 - RNA, 21 nt, synthetic construct
  source 1..21: mol_type = other RNA
gtatatcctgttagtgtatcc

SEQ ID NO: 7677 - RNA, 21 nt, synthetic construct
  source 1..21: mol_type = other RNA
gtatccctttggtgctcccaa

SEQ ID NO: 7678 - RNA, 21 nt, synthetic construct
  source 1..21: mol_type = other RNA
gtcaatgatggactgtatata

SEQ ID NO: 7679 - RNA, 21 nt, synthetic construct
  source 1..21: mol_type = other RNA
gtcatatatacagtccatcat

SEQ ID NO: 7680 - RNA, 21 nt, synthetic construct
  source 1..21: mol_type = other RNA
gtccatcattgaccaaaacat

SEQ ID NO: 7681 - RNA, 21 nt, synthetic construct
  source 1..21: mol_type = other RNA
gtctaatttctactgtgtaga

SEQ ID NO: 7682 - RNA, 21 nt, synthetic construct
  source 1..21: mol_type = other RNA
gtctcataagattaaaatagc

SEQ ID NO: 7683 - RNA, 21 nt, synthetic construct
  source 1..21: mol_type = other RNA
gtctgcagctacttcttttaa

SEQ ID NO: 7684 - RNA, 21 nt, synthetic construct
  source 1..21: mol_type = other RNA
gtgatctacacagtagaaatt

SEQ ID NO: 7685 - RNA, 21 nt, synthetic construct
  source 1..21: mol_type = other RNA
gtgctcccaaaatcttagaag

SEQ ID NO: 7686 - RNA, 21 nt, synthetic construct
  source 1..21: mol_type = other RNA
gtggtctcataagattaaaat

SEQ ID NO: 7687 - RNA, 21 nt, synthetic construct
  source 1..21: mol_type = other RNA
gtgtagatcacctttttaaaa

SEQ ID NO: 7688 - RNA, 21 nt, synthetic construct
  source 1..21: mol_type = other RNA
gtgtatccctttggtgctccc

SEQ ID NO: 7689 - RNA, 21 nt, synthetic construct
  source 1..21: mol_type = other RNA
gttagtgtatccctttggtgc

SEQ ID NO: 7690 - RNA, 21 nt, synthetic construct
  source 1..21: mol_type = other RNA
gttctccaaacccattataaa

SEQ ID NO: 7691 - RNA, 21 nt, synthetic construct
  source 1..21: mol_type = other RNA
gttgcagtaaaaatatgctat

SEQ ID NO: 7692 - RNA, 21 nt, synthetic construct
  source 1..21: mol_type = other RNA
gtttggagaactgtctgcagc

SEQ ID NO: 7693 - RNA, 21 nt, synthetic construct
  source 1..21: mol_type = other RNA
gtttggtaatgagatctgcaa

SEQ ID NO: 7694 - RNA, 21 nt, synthetic construct
  source 1..21: mol_type = other RNA
gttttggtcaatgatggactg

SEQ ID NO: 7695 - RNA, 21 nt, synthetic construct
  source 1..21: mol_type = other RNA
taaaaaggtgatctacacagt

SEQ ID NO: 7696 - RNA, 21 nt, synthetic construct
  source 1..21: mol_type = other RNA
taaaagaagtagctgcagaca

SEQ ID NO: 7697 - RNA, 21 nt, synthetic construct
  source 1..21: mol_type = other RNA
taaagagtatatcctgttagt

SEQ ID NO: 7698 - RNA, 21 nt, synthetic construct
  source 1..21: mol_type = other RNA
taagattttgggagcaccaaa

SEQ ID NO: 7699 - RNA, 21 nt, synthetic construct
  source 1..21: mol_type = other RNA
taatcttatgagaccactgtc

SEQ ID NO: 7700 - RNA, 21 nt, synthetic construct
  source 1..21: mol_type = other RNA
taatgagatctgcaatccaaa

SEQ ID NO: 7701 - RNA, 21 nt, synthetic construct
  source 1..21: mol_type = other RNA
taatgggtttggagaactgtc

SEQ ID NO: 7702 - RNA, 21 nt, synthetic construct
  source 1..21: mol_type = other RNA
taatttctactgtgtagatca

SEQ ID NO: 7703 - RNA, 21 nt, synthetic construct
  source 1..21: mol_type = other RNA
tacacagtagaaattagacaa

SEQ ID NO: 7704 - RNA, 21 nt, synthetic construct
  source 1..21: mol_type = other RNA
tacactaacaggatatactct

SEQ ID NO: 7705 - RNA, 21 nt, synthetic construct
  source 1..21: mol_type = other RNA
tacagtccatcattgaccaaa

SEQ ID NO: 7706 - RNA, 21 nt, synthetic construct
  source 1..21: mol_type = other RNA
taccaaacttgtctaatttct

SEQ ID NO: 7707 - RNA, 21 nt, synthetic construct
  source 1..21: mol_type = other RNA
tactctttataatgggtttgg

SEQ ID NO: 7708 - RNA, 21 nt, synthetic construct
  source 1..21: mol_type = other RNA
tactgtgtagatcaccttttt

SEQ ID NO: 7709 - RNA, 21 nt, synthetic construct
  source 1..21: mol_type = other RNA
tagaaattagacaagtttggt

SEQ ID NO: 7710 - RNA, 21 nt, synthetic construct
  source 1..21: mol_type = other RNA
tagacaagtttggtaatgaga

SEQ ID NO: 7711 - RNA, 21 nt, synthetic construct
  source 1..21: mol_type = other RNA
tagctgcagacagttctccaa

SEQ ID NO: 7712 - RNA, 21 nt, synthetic construct
  source 1..21: mol_type = other RNA
tagtgtatccctttggtgctc

SEQ ID NO: 7713 - RNA, 21 nt, synthetic construct
  source 1..21: mol_type = other RNA
tataatgggtttggagaactg

SEQ ID NO: 7714 - RNA, 21 nt, synthetic construct
  source 1..21: mol_type = other RNA
tatatacagtccatcattgac

SEQ ID NO: 7715 - RNA, 21 nt, synthetic construct
  source 1..21: mol_type = other RNA
tatatcctgttagtgtatccc

SEQ ID NO: 7716 - RNA, 21 nt, synthetic construct
  source 1..21: mol_type = other RNA
tatccctttggtgctcccaaa

SEQ ID NO: 7717 - RNA, 21 nt, synthetic construct
  source 1..21: mol_type = other RNA
tatcctgttagtgtatccctt

SEQ ID NO: 7718 - RNA, 21 nt, synthetic construct
  source 1..21: mol_type = other RNA
tatgacagtggtctcataaga

SEQ ID NO: 7719 - RNA, 21 nt, synthetic construct
  source 1..21: mol_type = other RNA
tatgagaccactgtcatatat

SEQ ID NO: 7720 - RNA, 21 nt, synthetic construct
  source 1..21: mol_type = other RNA
tatgatgttttggtcaatgat

SEQ ID NO: 7721 - RNA, 21 nt, synthetic construct
  source 1..21: mol_type = other RNA
tatttggattgcagatctcat

SEQ ID NO: 7722 - RNA, 21 nt, synthetic construct
  source 1..21: mol_type = other RNA
tcaatgatggactgtatatat

SEQ ID NO: 7723 - RNA, 21 nt, synthetic construct
  source 1..21: mol_type = other RNA
tcacctttttaaaagaagtag

SEQ ID NO: 7724 - RNA, 21 nt, synthetic construct
  source 1..21: mol_type = other RNA
tcagcattttttcttctaaga

SEQ ID NO: 7725 - RNA, 21 nt, synthetic construct
  source 1..21: mol_type = other RNA
tcatatatacagtccatcatt

SEQ ID NO: 7726 - RNA, 21 nt, synthetic construct
  source 1..21: mol_type = other RNA
tcatatcagcattttttcttc

SEQ ID NO: 7727 - RNA, 21 nt, synthetic construct
  source 1..21: mol_type = other RNA
tcattaccaaacttgtctaat

SEQ ID NO: 7728 - RNA, 21 nt, synthetic construct
  source 1..21: mol_type = other RNA
tcattgaccaaaacatcatat

SEQ ID NO: 7729 - RNA, 21 nt, synthetic construct
  source 1..21: mol_type = other RNA
tcattgctaacctttttcttt

SEQ ID NO: 7730 - RNA, 21 nt, synthetic construct
  source 1..21: mol_type = other RNA
tccaaacccattataaagagt

SEQ ID NO: 7731 - RNA, 21 nt, synthetic construct
  source 1..21: mol_type = other RNA
tccatcattgaccaaaacatc

SEQ ID NO: 7732 - RNA, 21 nt, synthetic construct
  source 1..21: mol_type = other RNA
tcccaaaatcttagaagaaaa

SEQ ID NO: 7733 - RNA, 21 nt, synthetic construct
  source 1..21: mol_type = other RNA
tccctttggtgctcccaaaat

SEQ ID NO: 7734 - RNA, 21 nt, synthetic construct
  source 1..21: mol_type = other RNA
tcctgttagtgtatccctttg

SEQ ID NO: 7735 - RNA, 21 nt, synthetic construct
  source 1..21: mol_type = other RNA
tctaagattttgggagcacca

SEQ ID NO: 7736 - RNA, 21 nt, synthetic construct
  source 1..21: mol_type = other RNA
tctaatttctactgtgtagat

SEQ ID NO: 7737 - RNA, 21 nt, synthetic construct
  source 1..21: mol_type = other RNA
tctacacagtagaaattagac

SEQ ID NO: 7738 - RNA, 21 nt, synthetic construct
  source 1..21: mol_type = other RNA
tctactgtgtagatcaccttt

SEQ ID NO: 7739 - RNA, 21 nt, synthetic construct
  source 1..21: mol_type = other RNA
tctcattaccaaacttgtcta

SEQ ID NO: 7740 - RNA, 21 nt, synthetic construct
  source 1..21: mol_type = other RNA
tctccaaacccattataaaga

SEQ ID NO: 7741 - RNA, 21 nt, synthetic construct
  source 1..21: mol_type = other RNA
tctgcagctacttcttttaaa

SEQ ID NO: 7742 - RNA, 21 nt, synthetic construct
  source 1..21: mol_type = other RNA
tcttagaagaaaaaatgctga

SEQ ID NO: 7743 - RNA, 21 nt, synthetic construct
  source 1..21: mol_type = other RNA
tcttatgagaccactgtcata

SEQ ID NO: 7744 - RNA, 21 nt, synthetic construct
  source 1..21: mol_type = other RNA
tcttctaagattttgggagca

SEQ ID NO: 7745 - RNA, 21 nt, synthetic construct
  source 1..21: mol_type = other RNA
tctttataatgggtttggaga

SEQ ID NO: 7746 - RNA, 21 nt, synthetic construct
  source 1..21: mol_type = other RNA
tcttttaaaaaggtgatctac

SEQ ID NO: 7747 - RNA, 21 nt, synthetic construct
  source 1..21: mol_type = other RNA
tgacagtggtctcataagatt

SEQ ID NO: 7748 - RNA, 21 nt, synthetic construct
  source 1..21: mol_type = other RNA
tgaccaaaacatcatatcagc

SEQ ID NO: 7749 - RNA, 21 nt, synthetic construct
  source 1..21: mol_type = other RNA
tgagaccactgtcatatatac

SEQ ID NO: 7750 - RNA, 21 nt, synthetic construct
  source 1..21: mol_type = other RNA
tgagatctgcaatccaaataa

SEQ ID NO: 7751 - RNA, 21 nt, synthetic construct
  source 1..21: mol_type = other RNA
tgatatgatgttttggtcaat

SEQ ID NO: 7752 - RNA, 21 nt, synthetic construct
  source 1..21: mol_type = other RNA
tgatctacacagtagaaatta

SEQ ID NO: 7753 - RNA, 21 nt, synthetic construct
  source 1..21: mol_type = other RNA
tgatggactgtatatatgaca

SEQ ID NO: 7754 - RNA, 21 nt, synthetic construct
  source 1..21: mol_type = other RNA
tgcagacagttctccaaaccc

SEQ ID NO: 7755 - RNA, 21 nt, synthetic construct
  source 1..21: mol_type = other RNA
tgcagatctcattaccaaact

SEQ ID NO: 7756 - RNA, 21 nt, synthetic construct
  source 1..21: mol_type = other RNA
tgcagctacttcttttaaaaa

SEQ ID NO: 7757 - RNA, 21 nt, synthetic construct
  source 1..21: mol_type = other RNA
tgctcccaaaatcttagaaga

SEQ ID NO: 7758 - RNA, 21 nt, synthetic construct
  source 1..21: mol_type = other RNA
tgctgatatgatgttttggtc

SEQ ID NO: 7759 - RNA, 21 nt, synthetic construct
  source 1..21: mol_type = other RNA
tggactgtatatatgacagtg

SEQ ID NO: 7760 - RNA, 21 nt, synthetic construct
  source 1..21: mol_type = other RNA
tggagaactgtctgcagctac

SEQ ID NO: 7761 - RNA, 21 nt, synthetic construct
  source 1..21: mol_type = other RNA
tggattgcagatctcattacc

SEQ ID NO: 7762 - RNA, 21 nt, synthetic construct
  source 1..21: mol_type = other RNA
tgggagcaccaaagggataca

SEQ ID NO: 7763 - RNA, 21 nt, synthetic construct
  source 1..21: mol_type = other RNA
tgggtttggagaactgtctgc

SEQ ID NO: 7764 - RNA, 21 nt, synthetic construct
  source 1..21: mol_type = other RNA
tggtaatgagatctgcaatcc

SEQ ID NO: 7765 - RNA, 21 nt, synthetic construct
  source 1..21: mol_type = other RNA
tggtcaatgatggactgtata

SEQ ID NO: 7766 - RNA, 21 nt, synthetic construct
  source 1..21: mol_type = other RNA
tggtgctcccaaaatcttaga

SEQ ID NO: 7767 - RNA, 21 nt, synthetic construct
  source 1..21: mol_type = other RNA
tgtagatcacctttttaaaag

SEQ ID NO: 7768 - RNA, 21 nt, synthetic construct
  source 1..21: mol_type = other RNA
tgtatatatgacagtggtctc

SEQ ID NO: 7769 - RNA, 21 nt, synthetic construct
  source 1..21: mol_type = other RNA
tgtatccctttggtgctccca

SEQ ID NO: 7770 - RNA, 21 nt, synthetic construct
  source 1..21: mol_type = other RNA
tgtcatatatacagtccatca

SEQ ID NO: 7771 - RNA, 21 nt, synthetic construct
  source 1..21: mol_type = other RNA
tgtctaatttctactgtgtag

SEQ ID NO: 7772 - RNA, 21 nt, synthetic construct
  source 1..21: mol_type = other RNA
tgtctgcagctacttctttta

SEQ ID NO: 7773 - RNA, 21 nt, synthetic construct
  source 1..21: mol_type = other RNA
tgtgtagatcacctttttaaa

SEQ ID NO: 7774 - RNA, 21 nt, synthetic construct
  source 1..21: mol_type = other RNA
tgttagtgtatccctttggtg

SEQ ID NO: 7775 - RNA, 21 nt, synthetic construct
  source 1..21: mol_type = other RNA
tgttttggtcaatgatggact

SEQ ID NO: 7776 - RNA, 21 nt, synthetic construct
  source 1..21: mol_type = other RNA
ttaaaaaggtgatctacacag

SEQ ID NO: 7777 - RNA, 21 nt, synthetic construct
  source 1..21: mol_type = other RNA
ttaaaagaagtagctgcagac

SEQ ID NO: 7778 - RNA, 21 nt, synthetic construct
  source 1..21: mol_type = other RNA
ttaccaaacttgtctaatttc

SEQ ID NO: 7779 - RNA, 21 nt, synthetic construct
  source 1..21: mol_type = other RNA
ttagacaagtttggtaatgag

SEQ ID NO: 7780 - RNA, 21 nt, synthetic construct
  source 1..21: mol_type = other RNA
ttagtgtatccctttggtgct

SEQ ID NO: 7781 - RNA, 21 nt, synthetic construct
  source 1..21: mol_type = other RNA
ttataatgggtttggagaact

SEQ ID NO: 7782 - RNA, 21 nt, synthetic construct
  source 1..21: mol_type = other RNA
ttatgagaccactgtcatata

SEQ ID NO: 7783 - RNA, 21 nt, synthetic construct
  source 1..21: mol_type = other RNA
ttatttggattgcagatctca

SEQ ID NO: 7784 - RNA, 21 nt, synthetic construct
  source 1..21: mol_type = other RNA
ttcattgctaacctttttctt

SEQ ID NO: 7785 - RNA, 21 nt, synthetic construct
  source 1..21: mol_type = other RNA
ttctaagattttgggagcacc

SEQ ID NO: 7786 - RNA, 21 nt, synthetic construct
  source 1..21: mol_type = other RNA
ttctactgtgtagatcacctt

SEQ ID NO: 7787 - RNA, 21 nt, synthetic construct
  source 1..21: mol_type = other RNA
ttctccaaacccattataaag

SEQ ID NO: 7788 - RNA, 21 nt, synthetic construct
  source 1..21: mol_type = other RNA
ttcttctaagattttgggagc

SEQ ID NO: 7789 - RNA, 21 nt, synthetic construct
  source 1..21: mol_type = other RNA
ttgaccaaaacatcatatcag

SEQ ID NO: 7790 - RNA, 21 nt, synthetic construct
  source 1..21: mol_type = other RNA
ttgcagatctcattaccaaac

SEQ ID NO: 7791 - RNA, 21 nt, synthetic construct
  source 1..21: mol_type = other RNA
ttggagaactgtctgcagcta

SEQ ID NO: 7792 - RNA, 21 nt, synthetic construct
  source 1..21: mol_type = other RNA
ttggattgcagatctcattac

SEQ ID NO: 7793 - RNA, 21 nt, synthetic construct
  source 1..21: mol_type = other RNA
ttgggagcaccaaagggatac

SEQ ID NO: 7794 - RNA, 21 nt, synthetic construct
  source 1..21: mol_type = other RNA
ttggtaatgagatctgcaatc

SEQ ID NO: 7795 - RNA, 21 nt, synthetic construct
  source 1..21: mol_type = other RNA
ttggtcaatgatggactgtat

SEQ ID NO: 7796 - RNA, 21 nt, synthetic construct
  source 1..21: mol_type = other RNA
ttggtgctcccaaaatcttag

SEQ ID NO: 7797 - RNA, 21 nt, synthetic construct
  source 1..21: mol_type = other RNA
ttgtctaatttctactgtgta

SEQ ID NO: 7798 - RNA, 21 nt, synthetic construct
  source 1..21: mol_type = other RNA
tttaaaaaggtgatctacaca

SEQ ID NO: 7799 - RNA, 21 nt, synthetic construct
  source 1..21: mol_type = other RNA
tttaaaagaagtagctgcaga

SEQ ID NO: 7800 - RNA, 21 nt, synthetic construct
  source 1..21: mol_type = other RNA
tttataatgggtttggagaac

SEQ ID NO: 7801 - RNA, 21 nt, synthetic construct
  source 1..21: mol_type = other RNA
tttatttggattgcagatctc

SEQ ID NO: 7802 - RNA, 21 nt, synthetic construct
  source 1..21: mol_type = other RNA
tttctactgtgtagatcacct

SEQ ID NO: 7803 - RNA, 21 nt, synthetic construct
  source 1..21: mol_type = other RNA
tttcttctaagattttgggag

SEQ ID NO: 7804 - RNA, 21 nt, synthetic construct
  source 1..21: mol_type = other RNA
tttggagaactgtctgcagct

SEQ ID NO: 7805 - RNA, 21 nt, synthetic construct
  source 1..21: mol_type = other RNA
tttggattgcagatctcatta

SEQ ID NO: 7806 - RNA, 21 nt, synthetic construct
  source 1..21: mol_type = other RNA
tttgggagcaccaaagggata

SEQ ID NO: 7807 - RNA, 21 nt, synthetic construct
  source 1..21: mol_type = other RNA
tttggtaatgagatctgcaat

SEQ ID NO: 7808 - RNA, 21 nt, synthetic construct
  source 1..21: mol_type = other RNA
tttggtcaatgatggactgta

SEQ ID NO: 7809 - RNA, 21 nt, synthetic construct
  source 1..21: mol_type = other RNA
tttggtgctcccaaaatctta

SEQ ID NO: 7810 - RNA, 21 nt, synthetic construct
  source 1..21: mol_type = other RNA
ttttaaaaaggtgatctacac

SEQ ID NO: 7811 - RNA, 21 nt, synthetic construct
  source 1..21: mol_type = other RNA
ttttaaaagaagtagctgcag

SEQ ID NO: 7812 - RNA, 21 nt, synthetic construct
  source 1..21: mol_type = other RNA
ttttatttggattgcagatct

SEQ ID NO: 7813 - RNA, 21 nt, synthetic construct
  source 1..21: mol_type = other RNA
ttttcttctaagattttggga

SEQ ID NO: 7814 - RNA, 21 nt, synthetic construct
  source 1..21: mol_type = other RNA
ttttgggagcaccaaagggat

SEQ ID NO: 7815 - RNA, 21 nt, synthetic construct
  source 1..21: mol_type = other RNA
ttttggtcaatgatggactgt

SEQ ID NO: 7816 - RNA, 21 nt, synthetic construct
  source 1..21: mol_type = other RNA
tttttaaaagaagtagctgca

SEQ ID NO: 7817 - RNA, 21 nt, synthetic construct
  source 1..21: mol_type = other RNA
tttttcttctaagattttggg

SEQ ID NO: 7818 - RNA, 22 nt, synthetic construct
  source 1..22: mol_type = other RNA
aaaaaggtgatctacacagtag

SEQ ID NO: 7819 - RNA, 22 nt, synthetic construct
  source 1..22: mol_type = other RNA
aaaagaaaaaggttagcaatga

SEQ ID NO: 7820 - RNA, 22 nt, synthetic construct
  source 1..22: mol_type = other RNA
aaaagaaaagaaaaaggttagc

SEQ ID NO: 7821 - RNA, 22 nt, synthetic construct
  source 1..22: mol_type = other RNA
aaaagaagtagctgcagacagt

SEQ ID NO: 7822 - RNA, 22 nt, synthetic construct
  source 1..22: mol_type = other RNA
aaaaggtgatctacacagtaga

SEQ ID NO: 7823 - RNA, 22 nt, synthetic construct
  source 1..22: mol_type = other RNA
aaaatgctgatatgatgttttg

SEQ ID NO: 7824 - RNA, 22 nt, synthetic construct
  source 1..22: mol_type = other RNA
aaacttgtctaatttctactgt

SEQ ID NO: 7825 - RNA, 22 nt, synthetic construct
  source 1..22: mol_type = other RNA
aaagaaaaaggttagcaatgaa

SEQ ID NO: 7826 - RNA, 22 nt, synthetic construct
  source 1..22: mol_type = other RNA
aaagaaaagaaaaaggttagca

SEQ ID NO: 7827 - RNA, 22 nt, synthetic construct
  source 1..22: mol_type = other RNA
aaagaagtagctgcagacagtt

SEQ ID NO: 7828 - RNA, 22 nt, synthetic construct
  source 1..22: mol_type = other RNA
aaagagtatatcctgttagtgt

SEQ ID NO: 7829 - RNA, 22 nt, synthetic construct
  source 1..22: mol_type = other RNA
aaagggatacactaacaggata

SEQ ID NO: 7830 - RNA, 22 nt, synthetic construct
  source 1..22: mol_type = other RNA
aaaggtgatctacacagtagaa

SEQ ID NO: 7831 - RNA, 22 nt, synthetic construct
  source 1..22: mol_type = other RNA
aaatgctgatatgatgttttgg

SEQ ID NO: 7832 - RNA, 22 nt, synthetic construct
  source 1..22: mol_type = other RNA
aaattagacaagtttggtaatg

SEQ ID NO: 7833 - RNA, 22 nt, synthetic construct
  source 1..22: mol_type = other RNA
aaattcattgctaacctttttc

SEQ ID NO: 7834 - RNA, 22 nt, synthetic construct
  source 1..22: mol_type = other RNA
aacatcatatcagcattttttc

SEQ ID NO: 7835 - RNA, 22 nt, synthetic construct
  source 1..22: mol_type = other RNA
aacccattataaagagtatatc

SEQ ID NO: 7836 - RNA, 22 nt, synthetic construct
  source 1..22: mol_type = other RNA
aactgtctgcagctacttcttt

SEQ ID NO: 7837 - RNA, 22 nt, synthetic construct
  source 1..22: mol_type = other RNA
aacttgtctaatttctactgtg

SEQ ID NO: 7838 - RNA, 22 nt, synthetic construct
  source 1..22: mol_type = other RNA
aagaaaaaatgctgatatgatg

SEQ ID NO: 7839 - RNA, 22 nt, synthetic construct
  source 1..22: mol_type = other RNA
aagaaaaaggttagcaatgaat

SEQ ID NO: 7840 - RNA, 22 nt, synthetic construct
  source 1..22: mol_type = other RNA
aagaaaagaaaaaggttagcaa

SEQ ID NO: 7841 - RNA, 22 nt, synthetic construct
  source 1..22: mol_type = other RNA
aagaagtagctgcagacagttc

SEQ ID NO: 7842 - RNA, 22 nt, synthetic construct
  source 1..22: mol_type = other RNA
aagagtatatcctgttagtgta

SEQ ID NO: 7843 - RNA, 22 nt, synthetic construct
  source 1..22: mol_type = other RNA
aagattttgggagcaccaaagg

SEQ ID NO: 7844 - RNA, 22 nt, synthetic construct
  source 1..22: mol_type = other RNA
aagggatacactaacaggatat

SEQ ID NO: 7845 - RNA, 22 nt, synthetic construct
  source 1..22: mol_type = other RNA
aaggtgatctacacagtagaaa

SEQ ID NO: 7846 - RNA, 22 nt, synthetic construct
  source 1..22: mol_type = other RNA
aagtagctgcagacagttctcc

SEQ ID NO: 7847 - RNA, 22 nt, synthetic construct
  source 1..22: mol_type = other RNA
aagtttggtaatgagatctgca

SEQ ID NO: 7848 - RNA, 22 nt, synthetic construct
  source 1..22: mol_type = other RNA
aatcttagaagaaaaaatgctg

SEQ ID NO: 7849 - RNA, 22 nt, synthetic construct
  source 1..22: mol_type = other RNA
aatcttatgagaccactgtcat

SEQ ID NO: 7850 - RNA, 22 nt, synthetic construct
  source 1..22: mol_type = other RNA
aatgagatctgcaatccaaata

SEQ ID NO: 7851 - RNA, 22 nt, synthetic construct
  source 1..22: mol_type = other RNA
aatgatggactgtatatatgac

SEQ ID NO: 7852 - RNA, 22 nt, synthetic construct
  source 1..22: mol_type = other RNA
aatgctgatatgatgttttggt

SEQ ID NO: 7853 - RNA, 22 nt, synthetic construct
  source 1..22: mol_type = other RNA
aatgggtttggagaactgtctg

SEQ ID NO: 7854 - RNA, 22 nt, synthetic construct
  source 1..22: mol_type = other RNA
aattagacaagtttggtaatga

SEQ ID NO: 7855 - RNA, 22 nt, synthetic construct
  source 1..22: mol_type = other RNA
aattcattgctaacctttttct

SEQ ID NO: 7856 - RNA, 22 nt, synthetic construct
  source 1..22: mol_type = other RNA
aatttctactgtgtagatcacc

SEQ ID NO: 7857 - RNA, 22 nt, synthetic construct
  source 1..22: mol_type = other RNA
acaagtttggtaatgagatctg

SEQ ID NO: 7858 - RNA, 22 nt, synthetic construct
  source 1..22: mol_type = other RNA
acacagtagaaattagacaagt

SEQ ID NO: 7859 - RNA, 22 nt, synthetic construct
  source 1..22: mol_type = other RNA
acactaacaggatatactcttt

SEQ ID NO: 7860 - RNA, 22 nt, synthetic construct
  source 1..22: mol_type = other RNA
acaggatatactctttataatg

SEQ ID NO: 7861 - RNA, 22 nt, synthetic construct
  source 1..22: mol_type = other RNA
acagtagaaattagacaagttt

SEQ ID NO: 7862 - RNA, 22 nt, synthetic construct
  source 1..22: mol_type = other RNA
acagtccatcattgaccaaaac

SEQ ID NO: 7863 - RNA, 22 nt, synthetic construct
  source 1..22: mol_type = other RNA
acagtggtctcataagattaaa

SEQ ID NO: 7864 - RNA, 22 nt, synthetic construct
  source 1..22: mol_type = other RNA
acagttctccaaacccattata

SEQ ID NO: 7865 - RNA, 22 nt, synthetic construct
  source 1..22: mol_type = other RNA
acatcatatcagcattttttct

SEQ ID NO: 7866 - RNA, 22 nt, synthetic construct
  source 1..22: mol_type = other RNA
accaaaacatcatatcagcatt

SEQ ID NO: 7867 - RNA, 22 nt, synthetic construct
  source 1..22: mol_type = other RNA
accaaacttgtctaatttctac

SEQ ID NO: 7868 - RNA, 22 nt, synthetic construct
  source 1..22: mol_type = other RNA
accaaagggatacactaacagg

SEQ ID NO: 7869 - RNA, 22 nt, synthetic construct
  source 1..22: mol_type = other RNA
accactgtcatatatacagtcc

SEQ ID NO: 7870 - RNA, 22 nt, synthetic construct
  source 1..22: mol_type = other RNA
acccattataaagagtatatcc

SEQ ID NO: 7871 - RNA, 22 nt, synthetic construct
  source 1..22: mol_type = other RNA
acctttttaaaagaagtagctg

SEQ ID NO: 7872 - RNA, 22 nt, synthetic construct
  source 1..22: mol_type = other RNA
actaacaggatatactctttat

SEQ ID NO: 7873 - RNA, 22 nt, synthetic construct
  source 1..22: mol_type = other RNA
actctttataatgggtttggag

SEQ ID NO: 7874 - RNA, 22 nt, synthetic construct
  source 1..22: mol_type = other RNA
actgtatatatgacagtggtct

SEQ ID NO: 7875 - RNA, 22 nt, synthetic construct
  source 1..22: mol_type = other RNA
actgtcatatatacagtccatc

SEQ ID NO: 7876 - RNA, 22 nt, synthetic construct
  source 1..22: mol_type = other RNA
actgtctgcagctacttctttt

SEQ ID NO: 7877 - RNA, 22 nt, synthetic construct
  source 1..22: mol_type = other RNA
actgtgtagatcacctttttaa

SEQ ID NO: 7878 - RNA, 22 nt, synthetic construct
  source 1..22: mol_type = other RNA
acttcttttaaaaaggtgatct

SEQ ID NO: 7879 - RNA, 22 nt, synthetic construct
  source 1..22: mol_type = other RNA
acttgtctaatttctactgtgt

SEQ ID NO: 7880 - RNA, 22 nt, synthetic construct
  source 1..22: mol_type = other RNA
agaaaaaatgctgatatgatgt

SEQ ID NO: 7881 - RNA, 22 nt, synthetic construct
  source 1..22: mol_type = other RNA
agaaaaaggttagcaatgaatt

SEQ ID NO: 7882 - RNA, 22 nt, synthetic construct
  source 1..22: mol_type = other RNA
agaaaagaaaaaggttagcaat

SEQ ID NO: 7883 - RNA, 22 nt, synthetic construct
  source 1..22: mol_type = other RNA
agaaattagacaagtttggtaa

SEQ ID NO: 7884 - RNA, 22 nt, synthetic construct
  source 1..22: mol_type = other RNA
agaactgtctgcagctacttct

SEQ ID NO: 7885 - RNA, 22 nt, synthetic construct
  source 1..22: mol_type = other RNA
agaagaaaaaatgctgatatga

SEQ ID NO: 7886 - RNA, 22 nt, synthetic construct
  source 1..22: mol_type = other RNA
agaagtagctgcagacagttct

SEQ ID NO: 7887 - RNA, 22 nt, synthetic construct
  source 1..22: mol_type = other RNA
agacaagtttggtaatgagatc

SEQ ID NO: 7888 - RNA, 22 nt, synthetic construct
  source 1..22: mol_type = other RNA
agacagttctccaaacccatta

SEQ ID NO: 7889 - RNA, 22 nt, synthetic construct
  source 1..22: mol_type = other RNA
agaccactgtcatatatacagt

SEQ ID NO: 7890 - RNA, 22 nt, synthetic construct
  source 1..22: mol_type = other RNA
agagtatatcctgttagtgtat

SEQ ID NO: 7891 - RNA, 22 nt, synthetic construct
  source 1..22: mol_type = other RNA
agatcacctttttaaaagaagt

SEQ ID NO: 7892 - RNA, 22 nt, synthetic construct
  source 1..22: mol_type = other RNA
agatctcattaccaaacttgtc

SEQ ID NO: 7893 - RNA, 22 nt, synthetic construct
  source 1..22: mol_type = other RNA
agatctgcaatccaaataaaat

SEQ ID NO: 7894 - RNA, 22 nt, synthetic construct
  source 1..22: mol_type = other RNA
agattttgggagcaccaaaggg

SEQ ID NO: 7895 - RNA, 22 nt, synthetic construct
  source 1..22: mol_type = other RNA
agcaccaaagggatacactaac

SEQ ID NO: 7896 - RNA, 22 nt, synthetic construct
  source 1..22: mol_type = other RNA
agctacttcttttaaaaaggtg

SEQ ID NO: 7897 - RNA, 22 nt, synthetic construct
  source 1..22: mol_type = other RNA
agctgcagacagttctccaaac

SEQ ID NO: 7898 - RNA, 22 nt, synthetic construct
  source 1..22: mol_type = other RNA
aggatatactctttataatggg

SEQ ID NO: 7899 - RNA, 22 nt, synthetic construct
  source 1..22: mol_type = other RNA
agggatacactaacaggatata

SEQ ID NO: 7900 - RNA, 22 nt, synthetic construct
  source 1..22: mol_type = other RNA
aggtgatctacacagtagaaat

SEQ ID NO: 7901 - RNA, 22 nt, synthetic construct
  source 1..22: mol_type = other RNA
agtagaaattagacaagtttgg

SEQ ID NO: 7902 - RNA, 22 nt, synthetic construct
  source 1..22: mol_type = other RNA
agtagctgcagacagttctcca

SEQ ID NO: 7903 - RNA, 22 nt, synthetic construct
  source 1..22: mol_type = other RNA
agtatatcctgttagtgtatcc

SEQ ID NO: 7904 - RNA, 22 nt, synthetic construct
  source 1..22: mol_type = other RNA
agtccatcattgaccaaaacat

SEQ ID NO: 7905 - RNA, 22 nt, synthetic construct
  source 1..22: mol_type = other RNA
agtggtctcataagattaaaat

SEQ ID NO: 7906 - RNA, 22 nt, synthetic construct
  source 1..22: mol_type = other RNA
agtgtatccctttggtgctccc

SEQ ID NO: 7907 - RNA, 22 nt, synthetic construct
  source 1..22: mol_type = other RNA
agttctccaaacccattataaa

SEQ ID NO: 7908 - RNA, 22 nt, synthetic construct
  source 1..22: mol_type = other RNA
agtttggtaatgagatctgcaa

SEQ ID NO: 7909 - RNA, 22 nt, synthetic construct
  source 1..22: mol_type = other RNA
ataaagagtatatcctgttagt

SEQ ID NO: 7910 - RNA, 22 nt, synthetic construct
  source 1..22: mol_type = other RNA
ataatgggtttggagaactgtc

SEQ ID NO: 7911 - RNA, 22 nt, synthetic construct
  source 1..22: mol_type = other RNA
atacactaacaggatatactct

SEQ ID NO: 7912 - RNA, 22 nt, synthetic construct
  source 1..22: mol_type = other RNA
atacagtccatcattgaccaaa

SEQ ID NO: 7913 - RNA, 22 nt, synthetic construct
  source 1..22: mol_type = other RNA
atactctttataatgggtttgg

SEQ ID NO: 7914 - RNA, 22 nt, synthetic construct
  source 1..22: mol_type = other RNA
atatacagtccatcattgacca

SEQ ID NO: 7915 - RNA, 22 nt, synthetic construct
  source 1..22: mol_type = other RNA
atatatacagtccatcattgac

SEQ ID NO: 7916 - RNA, 22 nt, synthetic construct
  source 1..22: mol_type = other RNA
atatcctgttagtgtatccctt

SEQ ID NO: 7917 - RNA, 22 nt, synthetic construct
  source 1..22: mol_type = other RNA
atatgacagtggtctcataaga

SEQ ID NO: 7918 - RNA, 22 nt, synthetic construct
  source 1..22: mol_type = other RNA
atatgatgttttggtcaatgat

SEQ ID NO: 7919 - RNA, 22 nt, synthetic construct
  source 1..22: mol_type = other RNA
atcacctttttaaaagaagtag

SEQ ID NO: 7920 - RNA, 22 nt, synthetic construct
  source 1..22: mol_type = other RNA
atcagcattttttcttctaaga

SEQ ID NO: 7921 - RNA, 22 nt, synthetic construct
  source 1..22: mol_type = other RNA
atcatatcagcattttttcttc

SEQ ID NO: 7922 - RNA, 22 nt, synthetic construct
  source 1..22: mol_type = other RNA
atcattgaccaaaacatcatat

SEQ ID NO: 7923 - RNA, 22 nt, synthetic construct
  source 1..22: mol_type = other RNA
atccctttggtgctcccaaaat

SEQ ID NO: 7924 - RNA, 22 nt, synthetic construct
  source 1..22: mol_type = other RNA
atcctgttagtgtatccctttg

SEQ ID NO: 7925 - RNA, 22 nt, synthetic construct
  source 1..22: mol_type = other RNA
atctacacagtagaaattagac

SEQ ID NO: 7926 - RNA, 22 nt, synthetic construct
  source 1..22: mol_type = other RNA
atctcattaccaaacttgtcta

SEQ ID NO: 7927 - RNA, 22 nt, synthetic construct
  source 1..22: mol_type = other RNA
atcttagaagaaaaaatgctga

SEQ ID NO: 7928 - RNA, 22 nt, synthetic construct
  source 1..22: mol_type = other RNA
atcttatgagaccactgtcata

SEQ ID NO: 7929 - RNA, 22 nt, synthetic construct
  source 1..22: mol_type = other RNA
atgacagtggtctcataagatt

SEQ ID NO: 7930 - RNA, 22 nt, synthetic construct
  source 1..22: mol_type = other RNA
atgagaccactgtcatatatac

SEQ ID NO: 7931 - RNA, 22 nt, synthetic construct
  source 1..22: mol_type = other RNA
atgagatctgcaatccaaataa

SEQ ID NO: 7932 - RNA, 22 nt, synthetic construct
  source 1..22: mol_type = other RNA
atgatggactgtatatatgaca

SEQ ID NO: 7933 - RNA, 22 nt, synthetic construct
  source 1..22: mol_type = other RNA
atgctgatatgatgttttggtc

SEQ ID NO: 7934 - RNA, 22 nt, synthetic construct
  source 1..22: mol_type = other RNA
atggactgtatatatgacagtg

SEQ ID NO: 7935 - RNA, 22 nt, synthetic construct
  source 1..22: mol_type = other RNA
atgggtttggagaactgtctgc

SEQ ID NO: 7936 - RNA, 22 nt, synthetic construct
  source 1..22: mol_type = other RNA
atgttttggtcaatgatggact

SEQ ID NO: 7937 - RNA, 22 nt, synthetic construct
  source 1..22: mol_type = other RNA
attaccaaacttgtctaatttc

SEQ ID NO: 7938 - RNA, 22 nt, synthetic construct
  source 1..22: mol_type = other RNA
attagacaagtttggtaatgag

SEQ ID NO: 7939 - RNA, 22 nt, synthetic construct
  source 1..22: mol_type = other RNA
attcattgctaacctttttctt

SEQ ID NO: 7940 - RNA, 22 nt, synthetic construct
  source 1..22: mol_type = other RNA
attgaccaaaacatcatatcag

SEQ ID NO: 7941 - RNA, 22 nt, synthetic construct
  source 1..22: mol_type = other RNA
attgcagatctcattaccaaac

SEQ ID NO: 7942 - RNA, 22 nt, synthetic construct
  source 1..22: mol_type = other RNA
atttctactgtgtagatcacct

SEQ ID NO: 7943 - RNA, 22 nt, synthetic construct
  source 1..22: mol_type = other RNA
atttggattgcagatctcatta

SEQ ID NO: 7944 - RNA, 22 nt, synthetic construct
  source 1..22: mol_type = other RNA
attttatttggattgcagatct

SEQ ID NO: 7945 - RNA, 22 nt, synthetic construct
  source 1..22: mol_type = other RNA
attttgggagcaccaaagggat

SEQ ID NO: 7946 - RNA, 22 nt, synthetic construct
  source 1..22: mol_type = other RNA
caaaacatcatatcagcatttt

SEQ ID NO: 7947 - RNA, 22 nt, synthetic construct
  source 1..22: mol_type = other RNA
caaacccattataaagagtata

SEQ ID NO: 7948 - RNA, 22 nt, synthetic construct
  source 1..22: mol_type = other RNA
caaacttgtctaatttctactg

SEQ ID NO: 7949 - RNA, 22 nt, synthetic construct
  source 1..22: mol_type = other RNA
caaagggatacactaacaggat

SEQ ID NO: 7950 - RNA, 22 nt, synthetic construct
  source 1..22: mol_type = other RNA
caagtttggtaatgagatctgc

SEQ ID NO: 7951 - RNA, 22 nt, synthetic construct
  source 1..22: mol_type = other RNA
caatgatggactgtatatatga

SEQ ID NO: 7952 - RNA, 22 nt, synthetic construct
  source 1..22: mol_type = other RNA
cacagtagaaattagacaagtt

SEQ ID NO: 7953 - RNA, 22 nt, synthetic construct
  source 1..22: mol_type = other RNA
caccaaagggatacactaacag

SEQ ID NO: 7954 - RNA, 22 nt, synthetic construct
  source 1..22: mol_type = other RNA
cacctttttaaaagaagtagct

SEQ ID NO: 7955 - RNA, 22 nt, synthetic construct
  source 1..22: mol_type = other RNA
cactaacaggatatactcttta

SEQ ID NO: 7956 - RNA, 22 nt, synthetic construct
  source 1..22: mol_type = other RNA
cactgtcatatatacagtccat

SEQ ID NO: 7957 - RNA, 22 nt, synthetic construct
  source 1..22: mol_type = other RNA
cagacagttctccaaacccatt

SEQ ID NO: 7958 - RNA, 22 nt, synthetic construct
  source 1..22: mol_type = other RNA
cagatctcattaccaaacttgt

SEQ ID NO: 7959 - RNA, 22 nt, synthetic construct
  source 1..22: mol_type = other RNA
cagcattttttcttctaagatt

SEQ ID NO: 7960 - RNA, 22 nt, synthetic construct
  source 1..22: mol_type = other RNA
cagctacttcttttaaaaaggt

SEQ ID NO: 7961 - RNA, 22 nt, synthetic construct
  source 1..22: mol_type = other RNA
caggatatactctttataatgg

SEQ ID NO: 7962 - RNA, 22 nt, synthetic construct
  source 1..22: mol_type = other RNA
cagtagaaattagacaagtttg

SEQ ID NO: 7963 - RNA, 22 nt, synthetic construct
  source 1..22: mol_type = other RNA
cagtccatcattgaccaaaaca

SEQ ID NO: 7964 - RNA, 22 nt, synthetic construct
  source 1..22: mol_type = other RNA
cagtggtctcataagattaaaa

SEQ ID NO: 7965 - RNA, 22 nt, synthetic construct
  source 1..22: mol_type = other RNA
cagttctccaaacccattataa

SEQ ID NO: 7966 - RNA, 22 nt, synthetic construct
  source 1..22: mol_type = other RNA
catatatacagtccatcattga

SEQ ID NO: 7967 - RNA, 22 nt, synthetic construct
  source 1..22: mol_type = other RNA
catatcagcattttttcttcta

SEQ ID NO: 7968 - RNA, 22 nt, synthetic construct
  source 1..22: mol_type = other RNA
catcatatcagcattttttctt

SEQ ID NO: 7969 - RNA, 22 nt, synthetic construct
  source 1..22: mol_type = other RNA
catcattgaccaaaacatcata

SEQ ID NO: 7970 - RNA, 22 nt, synthetic construct
  source 1..22: mol_type = other RNA
cattaccaaacttgtctaattt

SEQ ID NO: 7971 - RNA, 22 nt, synthetic construct
  source 1..22: mol_type = other RNA
cattataaagagtatatcctgt

SEQ ID NO: 7972 - RNA, 22 nt, synthetic construct
  source 1..22: mol_type = other RNA
cattgaccaaaacatcatatca

SEQ ID NO: 7973 - RNA, 22 nt, synthetic construct
  source 1..22: mol_type = other RNA
ccaaaacatcatatcagcattt

SEQ ID NO: 7974 - RNA, 22 nt, synthetic construct
  source 1..22: mol_type = other RNA
ccaaacccattataaagagtat

SEQ ID NO: 7975 - RNA, 22 nt, synthetic construct
  source 1..22: mol_type = other RNA
ccaaacttgtctaatttctact

SEQ ID NO: 7976 - RNA, 22 nt, synthetic construct
  source 1..22: mol_type = other RNA
ccaaagggatacactaacagga

SEQ ID NO: 7977 - RNA, 22 nt, synthetic construct
  source 1..22: mol_type = other RNA
ccactgtcatatatacagtcca

SEQ ID NO: 7978 - RNA, 22 nt, synthetic construct
  source 1..22: mol_type = other RNA
ccatcattgaccaaaacatcat

SEQ ID NO: 7979 - RNA, 22 nt, synthetic construct
  source 1..22: mol_type = other RNA
ccattataaagagtatatcctg

SEQ ID NO: 7980 - RNA, 22 nt, synthetic construct
  source 1..22: mol_type = other RNA
cccaaaatcttagaagaaaaaa

SEQ ID NO: 7981 - RNA, 22 nt, synthetic construct
  source 1..22: mol_type = other RNA
cccattataaagagtatatcct

SEQ ID NO: 7982 - RNA, 22 nt, synthetic construct
  source 1..22: mol_type = other RNA
ccctttggtgctcccaaaatct

SEQ ID NO: 7983 - RNA, 22 nt, synthetic construct
  source 1..22: mol_type = other RNA
cctgttagtgtatccctttggt

SEQ ID NO: 7984 - RNA, 22 nt, synthetic construct
  source 1..22: mol_type = other RNA
cctttggtgctcccaaaatctt

SEQ ID NO: 7985 - RNA, 22 nt, synthetic construct
  source 1..22: mol_type = other RNA
cctttttaaaagaagtagctgc

SEQ ID NO: 7986 - RNA, 22 nt, synthetic construct
  source 1..22: mol_type = other RNA
ctaacaggatatactctttata

SEQ ID NO: 7987 - RNA, 22 nt, synthetic construct
  source 1..22: mol_type = other RNA
ctaagattttgggagcaccaaa

SEQ ID NO: 7988 - RNA, 22 nt, synthetic construct
  source 1..22: mol_type = other RNA
ctaatttctactgtgtagatca

SEQ ID NO: 7989 - RNA, 22 nt, synthetic construct
  source 1..22: mol_type = other RNA
ctacacagtagaaattagacaa

SEQ ID NO: 7990 - RNA, 22 nt, synthetic construct
  source 1..22: mol_type = other RNA
ctactgtgtagatcaccttttt

SEQ ID NO: 7991 - RNA, 22 nt, synthetic construct
  source 1..22: mol_type = other RNA
ctacttcttttaaaaaggtgat

SEQ ID NO: 7992 - RNA, 22 nt, synthetic construct
  source 1..22: mol_type = other RNA
ctattttaatcttatgagacca

SEQ ID NO: 7993 - RNA, 22 nt, synthetic construct
  source 1..22: mol_type = other RNA
ctcattaccaaacttgtctaat

SEQ ID NO: 7994 - RNA, 22 nt, synthetic construct
  source 1..22: mol_type = other RNA
ctccaaacccattataaagagt

SEQ ID NO: 7995 - RNA, 22 nt, synthetic construct
  source 1..22: mol_type = other RNA
ctcccaaaatcttagaagaaaa

SEQ ID NO: 7996 - RNA, 22 nt, synthetic construct
  source 1..22: mol_type = other RNA
ctctttataatgggtttggaga

SEQ ID NO: 7997 - RNA, 22 nt, synthetic construct
  source 1..22: mol_type = other RNA
ctgaaaagaaaagaaaaaggtt

SEQ ID NO: 7998 - RNA, 22 nt, synthetic construct
  source 1..22: mol_type = other RNA
ctgatatgatgttttggtcaat

SEQ ID NO: 7999 - RNA, 22 nt, synthetic construct
  source 1..22: mol_type = other RNA
ctgcagacagttctccaaaccc

SEQ ID NO: 8000 - RNA, 22 nt, synthetic construct
  source 1..22: mol_type = other RNA
ctgcagctacttcttttaaaaa

SEQ ID NO: 8001 - RNA, 22 nt, synthetic construct
  source 1..22: mol_type = other RNA
ctgtatatatgacagtggtctc

SEQ ID NO: 8002 - RNA, 22 nt, synthetic construct
  source 1..22: mol_type = other RNA
ctgtcatatatacagtccatca

SEQ ID NO: 8003 - RNA, 22 nt, synthetic construct
  source 1..22: mol_type = other RNA
ctgtctgcagctacttctttta

SEQ ID NO: 8004 - RNA, 22 nt, synthetic construct
  source 1..22: mol_type = other RNA
ctgtgtagatcacctttttaaa

SEQ ID NO: 8005 - RNA, 22 nt, synthetic construct
  source 1..22: mol_type = other RNA
ctgttagtgtatccctttggtg

SEQ ID NO: 8006 - RNA, 22 nt, synthetic construct
  source 1..22: mol_type = other RNA
cttagaagaaaaaatgctgata

SEQ ID NO: 8007 - RNA, 22 nt, synthetic construct
  source 1..22: mol_type = other RNA
cttatgagaccactgtcatata

SEQ ID NO: 8008 - RNA, 22 nt, synthetic construct
  source 1..22: mol_type = other RNA
cttctaagattttgggagcacc

SEQ ID NO: 8009 - RNA, 22 nt, synthetic construct
  source 1..22: mol_type = other RNA
cttcttttaaaaaggtgatcta

SEQ ID NO: 8010 - RNA, 22 nt, synthetic construct
  source 1..22: mol_type = other RNA
cttgtctaatttctactgtgta

SEQ ID NO: 8011 - RNA, 22 nt, synthetic construct
  source 1..22: mol_type = other RNA
ctttataatgggtttggagaac

SEQ ID NO: 8012 - RNA, 22 nt, synthetic construct
  source 1..22: mol_type = other RNA
ctttggtgctcccaaaatctta

SEQ ID NO: 8013 - RNA, 22 nt, synthetic construct
  source 1..22: mol_type = other RNA
cttttaaaaaggtgatctacac

SEQ ID NO: 8014 - RNA, 22 nt, synthetic construct
  source 1..22: mol_type = other RNA
ctttttaaaagaagtagctgca

SEQ ID NO: 8015 - RNA, 22 nt, synthetic construct
  source 1..22: mol_type = other RNA
gaaaaaatgctgatatgatgtt

SEQ ID NO: 8016 - RNA, 22 nt, synthetic construct
  source 1..22: mol_type = other RNA
gaaaaaggttagcaatgaattt

SEQ ID NO: 8017 - RNA, 22 nt, synthetic construct
  source 1..22: mol_type = other RNA
gaaaagaaaaaggttagcaatg

SEQ ID NO: 8018 - RNA, 22 nt, synthetic construct
  source 1..22: mol_type = other RNA
gaaaagaaaagaaaaaggttag

SEQ ID NO: 8019 - RNA, 22 nt, synthetic construct
  source 1..22: mol_type = other RNA
gaaattagacaagtttggtaat

SEQ ID NO: 8020 - RNA, 22 nt, synthetic construct
  source 1..22: mol_type = other RNA
gaactgtctgcagctacttctt

SEQ ID NO: 8021 - RNA, 22 nt, synthetic construct
  source 1..22: mol_type = other RNA
gaagaaaaaatgctgatatgat

SEQ ID NO: 8022 - RNA, 22 nt, synthetic construct
  source 1..22: mol_type = other RNA
gaagtagctgcagacagttctc

SEQ ID NO: 8023 - RNA, 22 nt, synthetic construct
  source 1..22: mol_type = other RNA
gacaagtttggtaatgagatct

SEQ ID NO: 8024 - RNA, 22 nt, synthetic construct
  source 1..22: mol_type = other RNA
gacagtggtctcataagattaa

SEQ ID NO: 8025 - RNA, 22 nt, synthetic construct
  source 1..22: mol_type = other RNA
gacagttctccaaacccattat

SEQ ID NO: 8026 - RNA, 22 nt, synthetic construct
  source 1..22: mol_type = other RNA
gaccaaaacatcatatcagcat

SEQ ID NO: 8027 - RNA, 22 nt, synthetic construct
  source 1..22: mol_type = other RNA
gaccactgtcatatatacagtc

SEQ ID NO: 8028 - RNA, 22 nt, synthetic construct
  source 1..22: mol_type = other RNA
gactgtatatatgacagtggtc

SEQ ID NO: 8029 - RNA, 22 nt, synthetic construct
  source 1..22: mol_type = other RNA
gagaactgtctgcagctacttc

SEQ ID NO: 8030 - RNA, 22 nt, synthetic construct
  source 1..22: mol_type = other RNA
gagaccactgtcatatatacag

SEQ ID NO: 8031 - RNA, 22 nt, synthetic construct
  source 1..22: mol_type = other RNA
gagatctgcaatccaaataaaa

SEQ ID NO: 8032 - RNA, 22 nt, synthetic construct
  source 1..22: mol_type = other RNA
gagcaccaaagggatacactaa

SEQ ID NO: 8033 - RNA, 22 nt, synthetic construct
  source 1..22: mol_type = other RNA
gagtatatcctgttagtgtatc

SEQ ID NO: 8034 - RNA, 22 nt, synthetic construct
  source 1..22: mol_type = other RNA
gatacactaacaggatatactc

SEQ ID NO: 8035 - RNA, 22 nt, synthetic construct
  source 1..22: mol_type = other RNA
gatatactctttataatgggtt

SEQ ID NO: 8036 - RNA, 22 nt, synthetic construct
  source 1..22: mol_type = other RNA
gatatgatgttttggtcaatga

SEQ ID NO: 8037 - RNA, 22 nt, synthetic construct
  source 1..22: mol_type = other RNA
gatcacctttttaaaagaagta

SEQ ID NO: 8038 - RNA, 22 nt, synthetic construct
  source 1..22: mol_type = other RNA
gatctacacagtagaaattaga

SEQ ID NO: 8039 - RNA, 22 nt, synthetic construct
  source 1..22: mol_type = other RNA
gatctcattaccaaacttgtct

SEQ ID NO: 8040 - RNA, 22 nt, synthetic construct
  source 1..22: mol_type = other RNA
gatctgcaatccaaataaaata

SEQ ID NO: 8041 - RNA, 22 nt, synthetic construct
  source 1..22: mol_type = other RNA
gatggactgtatatatgacagt

SEQ ID NO: 8042 - RNA, 22 nt, synthetic construct
  source 1..22: mol_type = other RNA
gatgttttggtcaatgatggac

SEQ ID NO: 8043 - RNA, 22 nt, synthetic construct
  source 1..22: mol_type = other RNA
gattgcagatctcattaccaaa

SEQ ID NO: 8044 - RNA, 22 nt, synthetic construct
  source 1..22: mol_type = other RNA
gattttgggagcaccaaaggga

SEQ ID NO: 8045 - RNA, 22 nt, synthetic construct
  source 1..22: mol_type = other RNA
gcaccaaagggatacactaaca

SEQ ID NO: 8046 - RNA, 22 nt, synthetic construct
  source 1..22: mol_type = other RNA
gcagacagttctccaaacccat

SEQ ID NO: 8047 - RNA, 22 nt, synthetic construct
  source 1..22: mol_type = other RNA
gcagatctcattaccaaacttg

SEQ ID NO: 8048 - RNA, 22 nt, synthetic construct
  source 1..22: mol_type = other RNA
gcagctacttcttttaaaaagg

SEQ ID NO: 8049 - RNA, 22 nt, synthetic construct
  source 1..22: mol_type = other RNA
gctacttcttttaaaaaggtga

SEQ ID NO: 8050 - RNA, 22 nt, synthetic construct
  source 1..22: mol_type = other RNA
gctattttaatcttatgagacc

SEQ ID NO: 8051 - RNA, 22 nt, synthetic construct
  source 1..22: mol_type = other RNA
gctcccaaaatcttagaagaaa

SEQ ID NO: 8052 - RNA, 22 nt, synthetic construct
  source 1..22: mol_type = other RNA
gctgatatgatgttttggtcaa

SEQ ID NO: 8053 - RNA, 22 nt, synthetic construct
  source 1..22: mol_type = other RNA
gctgcagacagttctccaaacc

SEQ ID NO: 8054 - RNA, 22 nt, synthetic construct
  source 1..22: mol_type = other RNA
ggactgtatatatgacagtggt

SEQ ID NO: 8055 - RNA, 22 nt, synthetic construct
  source 1..22: mol_type = other RNA
ggagaactgtctgcagctactt

SEQ ID NO: 8056 - RNA, 22 nt, synthetic construct
  source 1..22: mol_type = other RNA
ggagcaccaaagggatacacta

SEQ ID NO: 8057 - RNA, 22 nt, synthetic construct
  source 1..22: mol_type = other RNA
ggatacactaacaggatatact

SEQ ID NO: 8058 - RNA, 22 nt, synthetic construct
  source 1..22: mol_type = other RNA
ggatatactctttataatgggt

SEQ ID NO: 8059 - RNA, 22 nt, synthetic construct
  source 1..22: mol_type = other RNA
ggattgcagatctcattaccaa

SEQ ID NO: 8060 - RNA, 22 nt, synthetic construct
  source 1..22: mol_type = other RNA
gggagcaccaaagggatacact

SEQ ID NO: 8061 - RNA, 22 nt, synthetic construct
  source 1..22: mol_type = other RNA
gggatacactaacaggatatac

SEQ ID NO: 8062 - RNA, 22 nt, synthetic construct
  source 1..22: mol_type = other RNA
gggtttggagaactgtctgcag

SEQ ID NO: 8063 - RNA, 22 nt, synthetic construct
  source 1..22: mol_type = other RNA
ggtaatgagatctgcaatccaa

SEQ ID NO: 8064 - RNA, 22 nt, synthetic construct
  source 1..22: mol_type = other RNA
ggtcaatgatggactgtatata

SEQ ID NO: 8065 - RNA, 22 nt, synthetic construct
  source 1..22: mol_type = other RNA
ggtctcataagattaaaatagc

SEQ ID NO: 8066 - RNA, 22 nt, synthetic construct
  source 1..22: mol_type = other RNA
ggtgatctacacagtagaaatt

SEQ ID NO: 8067 - RNA, 22 nt, synthetic construct
  source 1..22: mol_type = other RNA
ggtgctcccaaaatcttagaag

SEQ ID NO: 8068 - RNA, 22 nt, synthetic construct
  source 1..22: mol_type = other RNA
ggtttggagaactgtctgcagc

SEQ ID NO: 8069 - RNA, 22 nt, synthetic construct
  source 1..22: mol_type = other RNA
gtaatgagatctgcaatccaaa

SEQ ID NO: 8070 - RNA, 22 nt, synthetic construct
  source 1..22: mol_type = other RNA
gtagaaattagacaagtttggt

SEQ ID NO: 8071 - RNA, 22 nt, synthetic construct
  source 1..22: mol_type = other RNA
gtagatcacctttttaaaagaa

SEQ ID NO: 8072 - RNA, 22 nt, synthetic construct
  source 1..22: mol_type = other RNA
gtagctgcagacagttctccaa

SEQ ID NO: 8073 - RNA, 22 nt, synthetic construct
  source 1..22: mol_type = other RNA
gtatatatgacagtggtctcat

SEQ ID NO: 8074 - RNA, 22 nt, synthetic construct
  source 1..22: mol_type = other RNA
gtatatcctgttagtgtatccc

SEQ ID NO: 8075 - RNA, 22 nt, synthetic construct
  source 1..22: mol_type = other RNA
gtatccctttggtgctcccaaa

SEQ ID NO: 8076 - RNA, 22 nt, synthetic construct
  source 1..22: mol_type = other RNA
gtcaatgatggactgtatatat

SEQ ID NO: 8077 - RNA, 22 nt, synthetic construct
  source 1..22: mol_type = other RNA
gtcatatatacagtccatcatt

SEQ ID NO: 8078 - RNA, 22 nt, synthetic construct
  source 1..22: mol_type = other RNA
gtccatcattgaccaaaacatc

SEQ ID NO: 8079 - RNA, 22 nt, synthetic construct
  source 1..22: mol_type = other RNA
gtctaatttctactgtgtagat

SEQ ID NO: 8080 - RNA, 22 nt, synthetic construct
  source 1..22: mol_type = other RNA
gtctcataagattaaaatagca

SEQ ID NO: 8081 - RNA, 22 nt, synthetic construct
  source 1..22: mol_type = other RNA
gtctgcagctacttcttttaaa

SEQ ID NO: 8082 - RNA, 22 nt, synthetic construct
  source 1..22: mol_type = other RNA
gtgatctacacagtagaaatta

SEQ ID NO: 8083 - RNA, 22 nt, synthetic construct
  source 1..22: mol_type = other RNA
gtgctcccaaaatcttagaaga

SEQ ID NO: 8084 - RNA, 22 nt, synthetic construct
  source 1..22: mol_type = other RNA
gtggtctcataagattaaaata

SEQ ID NO: 8085 - RNA, 22 nt, synthetic construct
  source 1..22: mol_type = other RNA
gtgtagatcacctttttaaaag

SEQ ID NO: 8086 - RNA, 22 nt, synthetic construct
  source 1..22: mol_type = other RNA
gtgtatccctttggtgctccca

SEQ ID NO: 8087 - RNA, 22 nt, synthetic construct
  source 1..22: mol_type = other RNA
gttagtgtatccctttggtgct

SEQ ID NO: 8088 - RNA, 22 nt, synthetic construct
  source 1..22: mol_type = other RNA
gttctccaaacccattataaag

SEQ ID NO: 8089 - RNA, 22 nt, synthetic construct
  source 1..22: mol_type = other RNA
gttgcagtaaaaatatgctatt

SEQ ID NO: 8090 - RNA, 22 nt, synthetic construct
  source 1..22: mol_type = other RNA
gtttggagaactgtctgcagct

SEQ ID NO: 8091 - RNA, 22 nt, synthetic construct
  source 1..22: mol_type = other RNA
gtttggtaatgagatctgcaat

SEQ ID NO: 8092 - RNA, 22 nt, synthetic construct
  source 1..22: mol_type = other RNA
gttttggtcaatgatggactgt

SEQ ID NO: 8093 - RNA, 22 nt, synthetic construct
  source 1..22: mol_type = other RNA
taaaaaggtgatctacacagta

SEQ ID NO: 8094 - RNA, 22 nt, synthetic construct
  source 1..22: mol_type = other RNA
taaaagaagtagctgcagacag

SEQ ID NO: 8095 - RNA, 22 nt, synthetic construct
  source 1..22: mol_type = other RNA
taaagagtatatcctgttagtg

SEQ ID NO: 8096 - RNA, 22 nt, synthetic construct
  source 1..22: mol_type = other RNA
taagattttgggagcaccaaag

SEQ ID NO: 8097 - RNA, 22 nt, synthetic construct
  source 1..22: mol_type = other RNA
taatcttatgagaccactgtca

SEQ ID NO: 8098 - RNA, 22 nt, synthetic construct
  source 1..22: mol_type = other RNA
taatgagatctgcaatccaaat

SEQ ID NO: 8099 - RNA, 22 nt, synthetic construct
  source 1..22: mol_type = other RNA
taatgggtttggagaactgtct

SEQ ID NO: 8100 - RNA, 22 nt, synthetic construct
  source 1..22: mol_type = other RNA
taatttctactgtgtagatcac

SEQ ID NO: 8101 - RNA, 22 nt, synthetic construct
  source 1..22: mol_type = other RNA
tacacagtagaaattagacaag

SEQ ID NO: 8102 - RNA, 22 nt, synthetic construct
  source 1..22: mol_type = other RNA
tacactaacaggatatactctt

SEQ ID NO: 8103 - RNA, 22 nt, synthetic construct
  source 1..22: mol_type = other RNA
tacagtccatcattgaccaaaa

SEQ ID NO: 8104 - RNA, 22 nt, synthetic construct
  source 1..22: mol_type = other RNA
taccaaacttgtctaatttcta

SEQ ID NO: 8105 - RNA, 22 nt, synthetic construct
  source 1..22: mol_type = other RNA
tactctttataatgggtttgga

SEQ ID NO: 8106 - RNA, 22 nt, synthetic construct
  source 1..22: mol_type = other RNA
tactgtgtagatcaccttttta

SEQ ID NO: 8107 - RNA, 22 nt, synthetic construct
  source 1..22: mol_type = other RNA
tacttcttttaaaaaggtgatc

SEQ ID NO: 8108 - RNA, 22 nt, synthetic construct
  source 1..22: mol_type = other RNA
tagaaattagacaagtttggta

SEQ ID NO: 8109 - RNA, 22 nt, synthetic construct
  source 1..22: mol_type = other RNA
tagaagaaaaaatgctgatatg

SEQ ID NO: 8110 - RNA, 22 nt, synthetic construct
  source 1..22: mol_type = other RNA
tagacaagtttggtaatgagat

SEQ ID NO: 8111 - RNA, 22 nt, synthetic construct
  source 1..22: mol_type = other RNA
tagatcacctttttaaaagaag

SEQ ID NO: 8112 - RNA, 22 nt, synthetic construct
  source 1..22: mol_type = other RNA
tagctgcagacagttctccaaa

SEQ ID NO: 8113 - RNA, 22 nt, synthetic construct
  source 1..22: mol_type = other RNA
tagtgtatccctttggtgctcc

SEQ ID NO: 8114 - RNA, 22 nt, synthetic construct
  source 1..22: mol_type = other RNA
tataaagagtatatcctgttag

SEQ ID NO: 8115 - RNA, 22 nt, synthetic construct
  source 1..22: mol_type = other RNA
tataatgggtttggagaactgt

SEQ ID NO: 8116 - RNA, 22 nt, synthetic construct
  source 1..22: mol_type = other RNA
tatactctttataatgggtttg

SEQ ID NO: 8117 - RNA, 22 nt, synthetic construct
  source 1..22: mol_type = other RNA
tatatacagtccatcattgacc

SEQ ID NO: 8118 - RNA, 22 nt, synthetic construct
  source 1..22: mol_type = other RNA
tatatcctgttagtgtatccct

SEQ ID NO: 8119 - RNA, 22 nt, synthetic construct
  source 1..22: mol_type = other RNA
tatcagcattttttcttctaag

SEQ ID NO: 8120 - RNA, 22 nt, synthetic construct
  source 1..22: mol_type = other RNA
tatccctttggtgctcccaaaa

SEQ ID NO: 8121 - RNA, 22 nt, synthetic construct
  source 1..22: mol_type = other RNA
tatcctgttagtgtatcccttt

SEQ ID NO: 8122 - RNA, 22 nt, synthetic construct
  source 1..22: mol_type = other RNA
tatgacagtggtctcataagat

SEQ ID NO: 8123 - RNA, 22 nt, synthetic construct
  source 1..22: mol_type = other RNA
tatgagaccactgtcatatata

SEQ ID NO: 8124 - RNA, 22 nt, synthetic construct
  source 1..22: mol_type = other RNA
tatgatgttttggtcaatgatg

SEQ ID NO: 8125 - RNA, 22 nt, synthetic construct
  source 1..22: mol_type = other RNA
tatttggattgcagatctcatt

SEQ ID NO: 8126 - RNA, 22 nt, synthetic construct
  source 1..22: mol_type = other RNA
tattttaatcttatgagaccac

SEQ ID NO: 8127 - RNA, 22 nt, synthetic construct
  source 1..22: mol_type = other RNA
tattttatttggattgcagatc

SEQ ID NO: 8128 - RNA, 22 nt, synthetic construct
  source 1..22: mol_type = other RNA
tcaatgatggactgtatatatg

SEQ ID NO: 8129 - RNA, 22 nt, synthetic construct
  source 1..22: mol_type = other RNA
tcacctttttaaaagaagtagc

SEQ ID NO: 8130 - RNA, 22 nt, synthetic construct
  source 1..22: mol_type = other RNA
tcagcattttttcttctaagat

SEQ ID NO: 8131 - RNA, 22 nt, synthetic construct
  source 1..22: mol_type = other RNA
tcatatatacagtccatcattg

SEQ ID NO: 8132 - RNA, 22 nt, synthetic construct
  source 1..22: mol_type = other RNA
tcatatcagcattttttcttct

SEQ ID NO: 8133 - RNA, 22 nt, synthetic construct
  source 1..22: mol_type = other RNA
tcattaccaaacttgtctaatt

SEQ ID NO: 8134 - RNA, 22 nt, synthetic construct
  source 1..22: mol_type = other RNA
tcattgaccaaaacatcatatc

SEQ ID NO: 8135 - RNA, 22 nt, synthetic construct
  source 1..22: mol_type = other RNA
tcattgctaacctttttctttt

SEQ ID NO: 8136 - RNA, 22 nt, synthetic construct
  source 1..22: mol_type = other RNA
tccaaacccattataaagagta

SEQ ID NO: 8137 - RNA, 22 nt, synthetic construct
  source 1..22: mol_type = other RNA
tccatcattgaccaaaacatca

SEQ ID NO: 8138 - RNA, 22 nt, synthetic construct
  source 1..22: mol_type = other RNA
tcccaaaatcttagaagaaaaa

SEQ ID NO: 8139 - RNA, 22 nt, synthetic construct
  source 1..22: mol_type = other RNA
tccctttggtgctcccaaaatc

SEQ ID NO: 8140 - RNA, 22 nt, synthetic construct
  source 1..22: mol_type = other RNA
tcctgttagtgtatccctttgg

SEQ ID NO: 8141 - RNA, 22 nt, synthetic construct
  source 1..22: mol_type = other RNA
tctaagattttgggagcaccaa

SEQ ID NO: 8142 - RNA, 22 nt, synthetic construct
  source 1..22: mol_type = other RNA
tctaatttctactgtgtagatc

SEQ ID NO: 8143 - RNA, 22 nt, synthetic construct
  source 1..22: mol_type = other RNA
tctacacagtagaaattagaca

SEQ ID NO: 8144 - RNA, 22 nt, synthetic construct
  source 1..22: mol_type = other RNA
tctactgtgtagatcacctttt

SEQ ID NO: 8145 - RNA, 22 nt, synthetic construct
  source 1..22: mol_type = other RNA
tctcattaccaaacttgtctaa

SEQ ID NO: 8146 - RNA, 22 nt, synthetic construct
  source 1..22: mol_type = other RNA
tctccaaacccattataaagag

SEQ ID NO: 8147 - RNA, 22 nt, synthetic construct
  source 1..22: mol_type = other RNA
tctgcagctacttcttttaaaa

SEQ ID NO: 8148 - RNA, 22 nt, synthetic construct
  source 1..22: mol_type = other RNA
tcttagaagaaaaaatgctgat

SEQ ID NO: 8149 - RNA, 22 nt, synthetic construct
  source 1..22: mol_type = other RNA
tcttatgagaccactgtcatat

SEQ ID NO: 8150 - RNA, 22 nt, synthetic construct
  source 1..22: mol_type = other RNA
tcttctaagattttgggagcac

SEQ ID NO: 8151 - RNA, 22 nt, synthetic construct
  source 1..22: mol_type = other RNA
tctttataatgggtttggagaa

SEQ ID NO: 8152 - RNA, 22 nt, synthetic construct
  source 1..22: mol_type = other RNA
tcttttaaaaaggtgatctaca

SEQ ID NO: 8153 - RNA, 22 nt, synthetic construct
  source 1..22: mol_type = other RNA
tgacagtggtctcataagatta

SEQ ID NO: 8154 - RNA, 22 nt, synthetic construct
  source 1..22: mol_type = other RNA
tgaccaaaacatcatatcagca

SEQ ID NO: 8155 - RNA, 22 nt, synthetic construct
  source 1..22: mol_type = other RNA
tgagaccactgtcatatataca

SEQ ID NO: 8156 - RNA, 22 nt, synthetic construct
  source 1..22: mol_type = other RNA
tgagatctgcaatccaaataaa

SEQ ID NO: 8157 - RNA, 22 nt, synthetic construct
  source 1..22: mol_type = other RNA
tgatatgatgttttggtcaatg

SEQ ID NO: 8158 - RNA, 22 nt, synthetic construct
  source 1..22: mol_type = other RNA
tgatctacacagtagaaattag

SEQ ID NO: 8159 - RNA, 22 nt, synthetic construct
  source 1..22: mol_type = other RNA
tgatggactgtatatatgacag

SEQ ID NO: 8160 - RNA, 22 nt, synthetic construct
  source 1..22: mol_type = other RNA
tgatgttttggtcaatgatgga

SEQ ID NO: 8161 - RNA, 22 nt, synthetic construct
  source 1..22: mol_type = other RNA
tgcagacagttctccaaaccca

SEQ ID NO: 8162 - RNA, 22 nt, synthetic construct
  source 1..22: mol_type = other RNA
tgcagatctcattaccaaactt

SEQ ID NO: 8163 - RNA, 22 nt, synthetic construct
  source 1..22: mol_type = other RNA
tgcagctacttcttttaaaaag

SEQ ID NO: 8164 - RNA, 22 nt, synthetic construct
  source 1..22: mol_type = other RNA
tgctattttaatcttatgagac

SEQ ID NO: 8165 - RNA, 22 nt, synthetic construct
  source 1..22: mol_type = other RNA
tgctcccaaaatcttagaagaa

SEQ ID NO: 8166 - RNA, 22 nt, synthetic construct
  source 1..22: mol_type = other RNA
tgctgatatgatgttttggtca

SEQ ID NO: 8167 - RNA, 22 nt, synthetic construct
  source 1..22: mol_type = other RNA
tggactgtatatatgacagtgg

SEQ ID NO: 8168 - RNA, 22 nt, synthetic construct
  source 1..22: mol_type = other RNA
tggagaactgtctgcagctact

SEQ ID NO: 8169 - RNA, 22 nt, synthetic construct
  source 1..22: mol_type = other RNA
tggattgcagatctcattacca

SEQ ID NO: 8170 - RNA, 22 nt, synthetic construct
  source 1..22: mol_type = other RNA
tgggagcaccaaagggatacac

SEQ ID NO: 8171 - RNA, 22 nt, synthetic construct
  source 1..22: mol_type = other RNA
tgggtttggagaactgtctgca

SEQ ID NO: 8172 - RNA, 22 nt, synthetic construct
  source 1..22: mol_type = other RNA
tggtaatgagatctgcaatcca

SEQ ID NO: 8173 - RNA, 22 nt, synthetic construct
  source 1..22: mol_type = other RNA
tggtcaatgatggactgtatat

SEQ ID NO: 8174 - RNA, 22 nt, synthetic construct
  source 1..22: mol_type = other RNA
tggtctcataagattaaaatag

SEQ ID NO: 8175 - RNA, 22 nt, synthetic construct
  source 1..22: mol_type = other RNA
tggtgctcccaaaatcttagaa

SEQ ID NO: 8176 - RNA, 22 nt, synthetic construct
  source 1..22: mol_type = other RNA
tgtagatcacctttttaaaaga

SEQ ID NO: 8177 - RNA, 22 nt, synthetic construct
  source 1..22: mol_type = other RNA
tgtatatatgacagtggtctca

SEQ ID NO: 8178 - RNA, 22 nt, synthetic construct
  source 1..22: mol_type = other RNA
tgtatccctttggtgctcccaa

SEQ ID NO: 8179 - RNA, 22 nt, synthetic construct
  source 1..22: mol_type = other RNA
tgtcatatatacagtccatcat

SEQ ID NO: 8180 - RNA, 22 nt, synthetic construct
  source 1..22: mol_type = other RNA
tgtctaatttctactgtgtaga

SEQ ID NO: 8181 - RNA, 22 nt, synthetic construct
  source 1..22: mol_type = other RNA
tgtctgcagctacttcttttaa

SEQ ID NO: 8182 - RNA, 22 nt, synthetic construct
  source 1..22: mol_type = other RNA
tgtgtagatcacctttttaaaa

SEQ ID NO: 8183 - RNA, 22 nt, synthetic construct
  source 1..22: mol_type = other RNA
tgttagtgtatccctttggtgc

SEQ ID NO: 8184 - RNA, 22 nt, synthetic construct
  source 1..22: mol_type = other RNA
tgttttggtcaatgatggactg

SEQ ID NO: 8185 - RNA, 22 nt, synthetic construct
  source 1..22: mol_type = other RNA
ttaaaaaggtgatctacacagt

SEQ ID NO: 8186 - RNA, 22 nt, synthetic construct
  source 1..22: mol_type = other RNA
ttaaaagaagtagctgcagaca

SEQ ID NO: 8187 - RNA, 22 nt, synthetic construct
  source 1..22: mol_type = other RNA
ttaatcttatgagaccactgtc

SEQ ID NO: 8188 - RNA, 22 nt, synthetic construct
  source 1..22: mol_type = other RNA
ttaccaaacttgtctaatttct

SEQ ID NO: 8189 - RNA, 22 nt, synthetic construct
  source 1..22: mol_type = other RNA
ttagacaagtttggtaatgaga

SEQ ID NO: 8190 - RNA, 22 nt, synthetic construct
  source 1..22: mol_type = other RNA
ttagtgtatccctttggtgctc

SEQ ID NO: 8191 - RNA, 22 nt, synthetic construct
  source 1..22: mol_type = other RNA
ttataatgggtttggagaactg

SEQ ID NO: 8192 - RNA, 22 nt, synthetic construct
  source 1..22: mol_type = other RNA
ttatgagaccactgtcatatat

SEQ ID NO: 8193 - RNA, 22 nt, synthetic construct
  source 1..22: mol_type = other RNA
ttatttggattgcagatctcat

SEQ ID NO: 8194 - RNA, 22 nt, synthetic construct
  source 1..22: mol_type = other RNA
ttcattgctaacctttttcttt

SEQ ID NO: 8195 - RNA, 22 nt, synthetic construct
  source 1..22: mol_type = other RNA
ttctaagattttgggagcacca

SEQ ID NO: 8196 - RNA, 22 nt, synthetic construct
  source 1..22: mol_type = other RNA
ttctactgtgtagatcaccttt

SEQ ID NO: 8197 - RNA, 22 nt, synthetic construct
  source 1..22: mol_type = other RNA
ttctccaaacccattataaaga

SEQ ID NO: 8198 - RNA, 22 nt, synthetic construct
  source 1..22: mol_type = other RNA
ttcttctaagattttgggagca

SEQ ID NO: 8199 - RNA, 22 nt, synthetic construct
  source 1..22: mol_type = other RNA
ttcttttaaaaaggtgatctac

SEQ ID NO: 8200 - RNA, 22 nt, synthetic construct
  source 1..22: mol_type = other RNA
ttgaccaaaacatcatatcagc

SEQ ID NO: 8201 - RNA, 22 nt, synthetic construct
  source 1..22: mol_type = other RNA
ttgcagatctcattaccaaact

SEQ ID NO: 8202 - RNA, 22 nt, synthetic construct
  source 1..22: mol_type = other RNA
ttggagaactgtctgcagctac

SEQ ID NO: 8203 - RNA, 22 nt, synthetic construct
  source 1..22: mol_type = other RNA
ttggattgcagatctcattacc

SEQ ID NO: 8204 - RNA, 22 nt, synthetic construct
  source 1..22: mol_type = other RNA
ttgggagcaccaaagggataca

SEQ ID NO: 8205 - RNA, 22 nt, synthetic construct
  source 1..22: mol_type = other RNA
ttggtaatgagatctgcaatcc

SEQ ID NO: 8206 - RNA, 22 nt, synthetic construct
  source 1..22: mol_type = other RNA
ttggtcaatgatggactgtata

SEQ ID NO: 8207 - RNA, 22 nt, synthetic construct
  source 1..22: mol_type = other RNA
ttggtgctcccaaaatcttaga

SEQ ID NO: 8208 - RNA, 22 nt, synthetic construct
  source 1..22: mol_type = other RNA
ttgtctaatttctactgtgtag

SEQ ID NO: 8209 - RNA, 22 nt, synthetic construct
  source 1..22: mol_type = other RNA
tttaaaaaggtgatctacacag

SEQ ID NO: 8210 - RNA, 22 nt, synthetic construct
  source 1..22: mol_type = other RNA
tttaaaagaagtagctgcagac

SEQ ID NO: 8211 - RNA, 22 nt, synthetic construct
  source 1..22: mol_type = other RNA
tttataatgggtttggagaact

SEQ ID NO: 8212 - RNA, 22 nt, synthetic construct
  source 1..22: mol_type = other RNA
tttatttggattgcagatctca

SEQ ID NO: 8213 - RNA, 22 nt, synthetic construct
  source 1..22: mol_type = other RNA
tttctactgtgtagatcacctt

SEQ ID NO: 8214 - RNA, 22 nt, synthetic construct
  source 1..22: mol_type = other RNA
tttcttctaagattttgggagc

SEQ ID NO: 8215 - RNA, 22 nt, synthetic construct
  source 1..22: mol_type = other RNA
tttggagaactgtctgcagcta

SEQ ID NO: 8216 - RNA, 22 nt, synthetic construct
  source 1..22: mol_type = other RNA
tttggattgcagatctcattac

SEQ ID NO: 8217 - RNA, 22 nt, synthetic construct
  source 1..22: mol_type = other RNA
tttgggagcaccaaagggatac

SEQ ID NO: 8218 - RNA, 22 nt, synthetic construct
  source 1..22: mol_type = other RNA
tttggtaatgagatctgcaatc

SEQ ID NO: 8219 - RNA, 22 nt, synthetic construct
  source 1..22: mol_type = other RNA
tttggtcaatgatggactgtat

SEQ ID NO: 8220 - RNA, 22 nt, synthetic construct
  source 1..22: mol_type = other RNA
tttggtgctcccaaaatcttag

SEQ ID NO: 8221 - RNA, 22 nt, synthetic construct
  source 1..22: mol_type = other RNA
ttttaaaaaggtgatctacaca

SEQ ID NO: 8222 - RNA, 22 nt, synthetic construct
  source 1..22: mol_type = other RNA
ttttaaaagaagtagctgcaga

SEQ ID NO: 8223 - RNA, 22 nt, synthetic construct
  source 1..22: mol_type = other RNA
ttttatttggattgcagatctc

SEQ ID NO: 8224 - RNA, 22 nt, synthetic construct
  source 1..22: mol_type = other RNA
ttttcttctaagattttgggag

SEQ ID NO: 8225 - RNA, 22 nt, synthetic construct
  source 1..22: mol_type = other RNA
ttttgggagcaccaaagggata

SEQ ID NO: 8226 - RNA, 22 nt, synthetic construct
  source 1..22: mol_type = other RNA
ttttggtcaatgatggactgta

SEQ ID NO: 8227 - RNA, 22 nt, synthetic construct
  source 1..22: mol_type = other RNA
tttttaaaagaagtagctgcag

SEQ ID NO: 8228 - RNA, 22 nt, synthetic construct
  source 1..22: mol_type = other RNA
tttttcttctaagattttggga

SEQ ID NO: 8229 - RNA, 22 nt, synthetic construct
  source 1..22: mol_type = other RNA
ttttttcttctaagattttggg

SEQ ID NO: 8230 - RNA, 20 nt, synthetic construct
  source 1..20: mol_type = other RNA
aaaaaatgcacgaattacag

SEQ ID NO: 8231 - RNA, 20 nt, synthetic construct
  source 1..20: mol_type = other RNA
aaaaacgcctgccttctgcg

SEQ ID NO: 8232 - RNA, 20 nt, synthetic construct
  source 1..20: mol_type = other RNA
aaaaatgcacgaattacagc

SEQ ID NO: 8233 - RNA, 20 nt, synthetic construct
  source 1..20: mol_type = other RNA
aaaaattataagaactaccc

SEQ ID NO: 8234 - RNA, 20 nt, synthetic construct
  source 1..20: mol_type = other RNA
aaaacagttatcttccgcca

SEQ ID NO: 8235 - RNA, 20 nt, synthetic construct
  source 1..20: mol_type = other RNA
aaaacatgagggggttgggc

SEQ ID NO: 8236 - RNA, 20 nt, synthetic construct
  source 1..20: mol_type = other RNA
aaaaccgaaagtaagaggca

SEQ ID NO: 8237 - RNA, 20 nt, synthetic construct
  source 1..20: mol_type = other RNA
aaaacgcctgccttctgcgt

SEQ ID NO: 8238 - RNA, 20 nt, synthetic construct
  source 1..20: mol_type = other RNA
aaaagaccacagggcccatg

SEQ ID NO: 8239 - RNA, 20 nt, synthetic construct
  source 1..20: mol_type = other RNA
aaaagccctggttaggcttg

SEQ ID NO: 8240 - RNA, 20 nt, synthetic construct
  source 1..20: mol_type = other RNA
aaaagcctaagctcaagaga

SEQ ID NO: 8241 - RNA, 20 nt, synthetic construct
  source 1..20: mol_type = other RNA
aaaaggcatgcgctcccgca

SEQ ID NO: 8242 - RNA, 20 nt, synthetic construct
  source 1..20: mol_type = other RNA
aaaagtgacatgtgatggga

SEQ ID NO: 8243 - RNA, 20 nt, synthetic construct
  source 1..20: mol_type = other RNA
aaaatctcggtgccttagtt

SEQ ID NO: 8244 - RNA, 20 nt, synthetic construct
  source 1..20: mol_type = other RNA
aaaatgcacgaattacagcc

SEQ ID NO: 8245 - RNA, 20 nt, synthetic construct
  source 1..20: mol_type = other RNA
aaaattaaatgacgcaaagc

SEQ ID NO: 8246 - RNA, 20 nt, synthetic construct
  source 1..20: mol_type = other RNA
aaaattataagaactacccg

SEQ ID NO: 8247 - RNA, 20 nt, synthetic construct
  source 1..20: mol_type = other RNA
aaacaaccaggcaaagagcc

SEQ ID NO: 8248 - RNA, 20 nt, synthetic construct
  source 1..20: mol_type = other RNA
aaacagcacgcgacgtttgt

SEQ ID NO: 8249 - RNA, 20 nt, synthetic construct
  source 1..20: mol_type = other RNA
aaacagttatcttccgccat

SEQ ID NO: 8250 - RNA, 20 nt, synthetic construct
  source 1..20: mol_type = other RNA
aaacatgagggggttgggcg

SEQ ID NO: 8251 - RNA, 20 nt, synthetic construct
  source 1..20: mol_type = other RNA
aaaccctcccccaacctcgg

SEQ ID NO: 8252 - RNA, 20 nt, synthetic construct
  source 1..20: mol_type = other RNA
aaaccgaaagtaagaggcac

SEQ ID NO: 8253 - RNA, 20 nt, synthetic construct
  source 1..20: mol_type = other RNA
aaaccgctttgtatcacagc

SEQ ID NO: 8254 - RNA, 20 nt, synthetic construct
  source 1..20: mol_type = other RNA
aaacctcagcgccgcgcctt

SEQ ID NO: 8255 - RNA, 20 nt, synthetic construct
  source 1..20: mol_type = other RNA
aaacgcctgccttctgcgtg

SEQ ID NO: 8256 - RNA, 20 nt, synthetic construct
  source 1..20: mol_type = other RNA
aaacgtcgcgtgctgtttcc

SEQ ID NO: 8257 - RNA, 20 nt, synthetic construct
  source 1..20: mol_type = other RNA
aaactaaggcaccgagattt

SEQ ID NO: 8258 - RNA, 20 nt, synthetic construct
  source 1..20: mol_type = other RNA
aaactgggcggcatgggccc

SEQ ID NO: 8259 - RNA, 20 nt, synthetic construct
  source 1..20: mol_type = other RNA
aaacttaattacacagggga

SEQ ID NO: 8260 - RNA, 20 nt, synthetic construct
  source 1..20: mol_type = other RNA
aaactttgtcccgaccctcc

SEQ ID NO: 8261 - RNA, 20 nt, synthetic construct
  source 1..20: mol_type = other RNA
aaagaccacagggcccatgc

SEQ ID NO: 8262 - RNA, 20 nt, synthetic construct
  source 1..20: mol_type = other RNA
aaagagccaaagaggaagcc

SEQ ID NO: 8263 - RNA, 20 nt, synthetic construct
  source 1..20: mol_type = other RNA
aaagagcggaagagaaaccc

SEQ ID NO: 8264 - RNA, 20 nt, synthetic construct
  source 1..20: mol_type = other RNA
aaagaggaagccctctgtac

SEQ ID NO: 8265 - RNA, 20 nt, synthetic construct
  source 1..20: mol_type = other RNA
aaagatgtcaataacgggta

SEQ ID NO: 8266 - RNA, 20 nt, synthetic construct
  source 1..20: mol_type = other RNA
aaagcacataaagtccttgg

SEQ ID NO: 8267 - RNA, 20 nt, synthetic construct
  source 1..20: mol_type = other RNA
aaagccctggttaggcttga

SEQ ID NO: 8268 - RNA, 20 nt, synthetic construct
  source 1..20: mol_type = other RNA
aaagcctaagctcaagagat

SEQ ID NO: 8269 - RNA, 20 nt, synthetic construct
  source 1..20: mol_type = other RNA
aaagcggtttcgaataatta

SEQ ID NO: 8270 - RNA, 20 nt, synthetic construct
  source 1..20: mol_type = other RNA
aaaggcatgcgctcccgcaa

SEQ ID NO: 8271 - RNA, 20 nt, synthetic construct
  source 1..20: mol_type = other RNA
aaaggcgcggcgctgaggtt

SEQ ID NO: 8272 - RNA, 20 nt, synthetic construct
  source 1..20: mol_type = other RNA
aaaggggcaagtagcgcgcg

SEQ ID NO: 8273 - RNA, 20 nt, synthetic construct
  source 1..20: mol_type = other RNA
aaaggtctcccctgctcccc

SEQ ID NO: 8274 - RNA, 20 nt, synthetic construct
  source 1..20: mol_type = other RNA
aaagtaagaggcacagtaca

SEQ ID NO: 8275 - RNA, 20 nt, synthetic construct
  source 1..20: mol_type = other RNA
aaagtccttggcacacagaa

SEQ ID NO: 8276 - RNA, 20 nt, synthetic construct
  source 1..20: mol_type = other RNA
aaagtgacatgtgatgggaa

SEQ ID NO: 8277 - RNA, 20 nt, synthetic construct
  source 1..20: mol_type = other RNA
aaagtttagggcgtcgataa

SEQ ID NO: 8278 - RNA, 20 nt, synthetic construct
  source 1..20: mol_type = other RNA
aaatctcggtgccttagttt

SEQ ID NO: 8279 - RNA, 20 nt, synthetic construct
  source 1..20: mol_type = other RNA
aaatgacgcaaagcacataa

SEQ ID NO: 8280 - RNA, 20 nt, synthetic construct
  source 1..20: mol_type = other RNA
aaatgcacgaattacagcca

SEQ ID NO: 8281 - RNA, 20 nt, synthetic construct
  source 1..20: mol_type = other RNA
aaatggcagcaatcgagatt

SEQ ID NO: 8282 - RNA, 20 nt, synthetic construct
  source 1..20: mol_type = other RNA
aaattaaatgacgcaaagca

SEQ ID NO: 8283 - RNA, 20 nt, synthetic construct
  source 1..20: mol_type = other RNA
aaattataagaactacccgt

SEQ ID NO: 8284 - RNA, 20 nt, synthetic construct
  source 1..20: mol_type = other RNA
aacaaccaggcaaagagcca

SEQ ID NO: 8285 - RNA, 20 nt, synthetic construct
  source 1..20: mol_type = other RNA
aacagcacgcgacgtttgta

SEQ ID NO: 8286 - RNA, 20 nt, synthetic construct
  source 1..20: mol_type = other RNA
aacagttatcttccgccata

SEQ ID NO: 8287 - RNA, 20 nt, synthetic construct
  source 1..20: mol_type = other RNA
aacatgagggggttgggcgt

SEQ ID NO: 8288 - RNA, 20 nt, synthetic construct
  source 1..20: mol_type = other RNA
aacatggtgaagcctggtct

SEQ ID NO: 8289 - RNA, 20 nt, synthetic construct
  source 1..20: mol_type = other RNA
aaccaggcaaagagccaaag

SEQ ID NO: 8290 - RNA, 20 nt, synthetic construct
  source 1..20: mol_type = other RNA
aaccagggcttttgcgggag

SEQ ID NO: 8291 - RNA, 20 nt, synthetic construct
  source 1..20: mol_type = other RNA
aaccatagtagttatctatg

SEQ ID NO: 8292 - RNA, 20 nt, synthetic construct
  source 1..20: mol_type = other RNA
aaccccctcatgttttcaaa

SEQ ID NO: 8293 - RNA, 20 nt, synthetic construct
  source 1..20: mol_type = other RNA
aaccctcccccaacctcggc

SEQ ID NO: 8294 - RNA, 20 nt, synthetic construct
  source 1..20: mol_type = other RNA
aaccgaaagtaagaggcaca

SEQ ID NO: 8295 - RNA, 20 nt, synthetic construct
  source 1..20: mol_type = other RNA
aaccgctttgtatcacagcc

SEQ ID NO: 8296 - RNA, 20 nt, synthetic construct
  source 1..20: mol_type = other RNA
aacctcagcgccgcgccttt

SEQ ID NO: 8297 - RNA, 20 nt, synthetic construct
  source 1..20: mol_type = other RNA
aacctcggcgctctgacgct

SEQ ID NO: 8298 - RNA, 20 nt, synthetic construct
  source 1..20: mol_type = other RNA
aacgcctgccttctgcgtga

SEQ ID NO: 8299 - RNA, 20 nt, synthetic construct
  source 1..20: mol_type = other RNA
aacgcgtggaggggcgcttg

SEQ ID NO: 8300 - RNA, 20 nt, synthetic construct
  source 1..20: mol_type = other RNA
aacgggtagttcttataatt

SEQ ID NO: 8301 - RNA, 20 nt, synthetic construct
  source 1..20: mol_type = other RNA
aacgtcgcgtgctgtttcct

SEQ ID NO: 8302 - RNA, 20 nt, synthetic construct
  source 1..20: mol_type = other RNA
aactaaggcaccgagatttt

SEQ ID NO: 8303 - RNA, 20 nt, synthetic construct
  source 1..20: mol_type = other RNA
aactacccgttattgacatc

SEQ ID NO: 8304 - RNA, 20 nt, synthetic construct
  source 1..20: mol_type = other RNA
aactacggacctcaagccat

SEQ ID NO: 8305 - RNA, 20 nt, synthetic construct
  source 1..20: mol_type = other RNA
aactactatggttatcttct

SEQ ID NO: 8306 - RNA, 20 nt, synthetic construct
  source 1..20: mol_type = other RNA
aactgggcggcatgggccct

SEQ ID NO: 8307 - RNA, 20 nt, synthetic construct
  source 1..20: mol_type = other RNA
aacttaattacacaggggat

SEQ ID NO: 8308 - RNA, 20 nt, synthetic construct
  source 1..20: mol_type = other RNA
aacttagcgggcgcctagac

SEQ ID NO: 8309 - RNA, 20 nt, synthetic construct
  source 1..20: mol_type = other RNA
aacttatttgttcccatcac

SEQ ID NO: 8310 - RNA, 20 nt, synthetic construct
  source 1..20: mol_type = other RNA
aacttggagaagggaagtca

SEQ ID NO: 8311 - RNA, 20 nt, synthetic construct
  source 1..20: mol_type = other RNA
aactttgtcccgaccctccc

SEQ ID NO: 8312 - RNA, 20 nt, synthetic construct
  source 1..20: mol_type = other RNA
aagaaaaacgcctgccttct

SEQ ID NO: 8313 - RNA, 20 nt, synthetic construct
  source 1..20: mol_type = other RNA
aagaaactaaggcaccgaga

SEQ ID NO: 8314 - RNA, 20 nt, synthetic construct
  source 1..20: mol_type = other RNA
aagaaacttaattacacagg

SEQ ID NO: 8315 - RNA, 20 nt, synthetic construct
  source 1..20: mol_type = other RNA
aagaactacccgttattgac

SEQ ID NO: 8316 - RNA, 20 nt, synthetic construct
  source 1..20: mol_type = other RNA
aagaccacagggcccatgcc

SEQ ID NO: 8317 - RNA, 20 nt, synthetic construct
  source 1..20: mol_type = other RNA
aagagaaaccctcccccaac

SEQ ID NO: 8318 - RNA, 20 nt, synthetic construct
  source 1..20: mol_type = other RNA
aagagatcctcccgcctcag

SEQ ID NO: 8319 - RNA, 20 nt, synthetic construct
  source 1..20: mol_type = other RNA
aagagccaaagaggaagccc

SEQ ID NO: 8320 - RNA, 20 nt, synthetic construct
  source 1..20: mol_type = other RNA
aagagcggaagagaaaccct

SEQ ID NO: 8321 - RNA, 20 nt, synthetic construct
  source 1..20: mol_type = other RNA
aagaggaagccctctgtacg

SEQ ID NO: 8322 - RNA, 20 nt, synthetic construct
  source 1..20: mol_type = other RNA
aagaggcacagtacatcttg

SEQ ID NO: 8323 - RNA, 20 nt, synthetic construct
  source 1..20: mol_type = other RNA
aagataaccatagtagttat

SEQ ID NO: 8324 - RNA, 20 nt, synthetic construct
  source 1..20: mol_type = other RNA
aagatgtactgtgcctctta

SEQ ID NO: 8325 - RNA, 20 nt, synthetic construct
  source 1..20: mol_type = other RNA
aagatgtcaataacgggtag

SEQ ID NO: 8326 - RNA, 20 nt, synthetic construct
  source 1..20: mol_type = other RNA
aagcacataaagtccttggc

SEQ ID NO: 8327 - RNA, 20 nt, synthetic construct
  source 1..20: mol_type = other RNA
aagcagagccgcagcagaca

SEQ ID NO: 8328 - RNA, 20 nt, synthetic construct
  source 1..20: mol_type = other RNA
aagcattctacaaacgtcgc

SEQ ID NO: 8329 - RNA, 20 nt, synthetic construct
  source 1..20: mol_type = other RNA
aagccatcctcccgcctcgg

SEQ ID NO: 8330 - RNA, 20 nt, synthetic construct
  source 1..20: mol_type = other RNA
aagccctctgtacgaaaaga

SEQ ID NO: 8331 - RNA, 20 nt, synthetic construct
  source 1..20: mol_type = other RNA
aagccctggttaggcttgac

SEQ ID NO: 8332 - RNA, 20 nt, synthetic construct
  source 1..20: mol_type = other RNA
aagcctaaccagggcttttg

SEQ ID NO: 8333 - RNA, 20 nt, synthetic construct
  source 1..20: mol_type = other RNA
aagcctaagctcaagagatc

SEQ ID NO: 8334 - RNA, 20 nt, synthetic construct
  source 1..20: mol_type = other RNA
aagcctggtctctacaaaaa

SEQ ID NO: 8335 - RNA, 20 nt, synthetic construct
  source 1..20: mol_type = other RNA
aagcctgtctgctgcggctc

SEQ ID NO: 8336 - RNA, 20 nt, synthetic construct
  source 1..20: mol_type = other RNA
aagcgcccctccacgcgttc

SEQ ID NO: 8337 - RNA, 20 nt, synthetic construct
  source 1..20: mol_type = other RNA
aagcggcggggtggcctggg

SEQ ID NO: 8338 - RNA, 20 nt, synthetic construct
  source 1..20: mol_type = other RNA
aagcggtttcgaataattaa

SEQ ID NO: 8339 - RNA, 20 nt, synthetic construct
  source 1..20: mol_type = other RNA
aagcgtcagagcgccgaggt

SEQ ID NO: 8340 - RNA, 20 nt, synthetic construct
  source 1..20: mol_type = other RNA
aagctaccacgcccaacccc

SEQ ID NO: 8341 - RNA, 20 nt, synthetic construct
  source 1..20: mol_type = other RNA
aaggaccagagcgggagggt

SEQ ID NO: 8342 - RNA, 20 nt, synthetic construct
  source 1..20: mol_type = other RNA
aaggactttatgtgctttgc

SEQ ID NO: 8343 - RNA, 20 nt, synthetic construct
  source 1..20: mol_type = other RNA
aaggagaacttggagaaggg

SEQ ID NO: 8344 - RNA, 20 nt, synthetic construct
  source 1..20: mol_type = other RNA
aaggcaccgagattttaaga

SEQ ID NO: 8345 - RNA, 20 nt, synthetic construct
  source 1..20: mol_type = other RNA
aaggcaggcgtttttcttaa

SEQ ID NO: 8346 - RNA, 20 nt, synthetic construct
  source 1..20: mol_type = other RNA
aaggcatgcgctcccgcaaa

SEQ ID NO: 8347 - RNA, 20 nt, synthetic construct
  source 1..20: mol_type = other RNA
aaggcgcggcgctgaggttt

SEQ ID NO: 8348 - RNA, 20 nt, synthetic construct
  source 1..20: mol_type = other RNA
aagggaagcagagccgcagc

SEQ ID NO: 8349 - RNA, 20 nt, synthetic construct
  source 1..20: mol_type = other RNA
aagggaagtcacggagcgag

SEQ ID NO: 8350 - RNA, 20 nt, synthetic construct
  source 1..20: mol_type = other RNA
aaggggcaagtagcgcgcgt

SEQ ID NO: 8351 - RNA, 20 nt, synthetic construct
  source 1..20: mol_type = other RNA
aagggggtgcgcacccggga

SEQ ID NO: 8352 - RNA, 20 nt, synthetic construct
  source 1..20: mol_type = other RNA
aaggtctcccctgctccccg

SEQ ID NO: 8353 - RNA, 20 nt, synthetic construct
  source 1..20: mol_type = other RNA
aagtaagaggcacagtacat

SEQ ID NO: 8354 - RNA, 20 nt, synthetic construct
  source 1..20: mol_type = other RNA
aagtagcgcgcgtcccgggt

SEQ ID NO: 8355 - RNA, 20 nt, synthetic construct
  source 1..20: mol_type = other RNA
aagtcaagcctaaccagggc

SEQ ID NO: 8356 - RNA, 20 nt, synthetic construct
  source 1..20: mol_type = other RNA
aagtcacggagcgagagagc

SEQ ID NO: 8357 - RNA, 20 nt, synthetic construct
  source 1..20: mol_type = other RNA
aagtccacagctctccagtc

SEQ ID NO: 8358 - RNA, 20 nt, synthetic construct
  source 1..20: mol_type = other RNA
aagtccttggcacacagaaa

SEQ ID NO: 8359 - RNA, 20 nt, synthetic construct
  source 1..20: mol_type = other RNA
aagtgacatgtgatgggaac

SEQ ID NO: 8360 - RNA, 20 nt, synthetic construct
  source 1..20: mol_type = other RNA
aagttaattattcgaaaccg

SEQ ID NO: 8361 - RNA, 20 nt, synthetic construct
  source 1..20: mol_type = other RNA
aagttcgcatgtcctagcac

SEQ ID NO: 8362 - RNA, 20 nt, synthetic construct
  source 1..20: mol_type = other RNA
aagttctccttggtggcccg

SEQ ID NO: 8363 - RNA, 20 nt, synthetic construct
  source 1..20: mol_type = other RNA
aagtttagggcgtcgataag

SEQ ID NO: 8364 - RNA, 20 nt, synthetic construct
  source 1..20: mol_type = other RNA
aagtttcttaaaatctcggt

SEQ ID NO: 8365 - RNA, 20 nt, synthetic construct
  source 1..20: mol_type = other RNA
aataacgggtagttcttata

SEQ ID NO: 8366 - RNA, 20 nt, synthetic construct
  source 1..20: mol_type = other RNA
aatcgagattgaagtcaagc

SEQ ID NO: 8367 - RNA, 20 nt, synthetic construct
  source 1..20: mol_type = other RNA
aatctcacgcagaaggcagg

SEQ ID NO: 8368 - RNA, 20 nt, synthetic construct
  source 1..20: mol_type = other RNA
aatctcgattgctgccattt

SEQ ID NO: 8369 - RNA, 20 nt, synthetic construct
  source 1..20: mol_type = other RNA
aatctcggtgccttagtttc

SEQ ID NO: 8370 - RNA, 20 nt, synthetic construct
  source 1..20: mol_type = other RNA
aatgacgcaaagcacataaa

SEQ ID NO: 8371 - RNA, 20 nt, synthetic construct
  source 1..20: mol_type = other RNA
aatgcacgaattacagccaa

SEQ ID NO: 8372 - RNA, 20 nt, synthetic construct
  source 1..20: mol_type = other RNA
aatgcttggctgtgatacaa

SEQ ID NO: 8373 - RNA, 20 nt, synthetic construct
  source 1..20: mol_type = other RNA
aatggcagcaatcgagattg

SEQ ID NO: 8374 - RNA, 20 nt, synthetic construct
  source 1..20: mol_type = other RNA
aattaaatgacgcaaagcac

SEQ ID NO: 8375 - RNA, 20 nt, synthetic construct
  source 1..20: mol_type = other RNA
aattaacttatttgttccca

SEQ ID NO: 8376 - RNA, 20 nt, synthetic construct
  source 1..20: mol_type = other RNA
aattacacaggggataaatg

SEQ ID NO: 8377 - RNA, 20 nt, synthetic construct
  source 1..20: mol_type = other RNA
aattacagccaaaaggcatg

SEQ ID NO: 8378 - RNA, 20 nt, synthetic construct
  source 1..20: mol_type = other RNA
aattataagaactacccgtt

SEQ ID NO: 8379 - RNA, 20 nt, synthetic construct
  source 1..20: mol_type = other RNA
aattattcgaaaccgctttg

SEQ ID NO: 8380 - RNA, 20 nt, synthetic construct
  source 1..20: mol_type = other RNA
acaaacctcagcgccgcgcc

SEQ ID NO: 8381 - RNA, 20 nt, synthetic construct
  source 1..20: mol_type = other RNA
acaaacgtcgcgtgctgttt

SEQ ID NO: 8382 - RNA, 20 nt, synthetic construct
  source 1..20: mol_type = other RNA
acaaagcggtttcgaataat

SEQ ID NO: 8383 - RNA, 20 nt, synthetic construct
  source 1..20: mol_type = other RNA
acaaagtttagggcgtcgat

SEQ ID NO: 8384 - RNA, 20 nt, synthetic construct
  source 1..20: mol_type = other RNA
acaaccaggcaaagagccaa

SEQ ID NO: 8385 - RNA, 20 nt, synthetic construct
  source 1..20: mol_type = other RNA
acacagaaagatgtcaataa

SEQ ID NO: 8386 - RNA, 20 nt, synthetic construct
  source 1..20: mol_type = other RNA
acacaggggataaatggcag

SEQ ID NO: 8387 - RNA, 20 nt, synthetic construct
  source 1..20: mol_type = other RNA
acacccggctaatttttgtt

SEQ ID NO: 8388 - RNA, 20 nt, synthetic construct
  source 1..20: mol_type = other RNA
acaccgtggggaggaaacag

SEQ ID NO: 8389 - RNA, 20 nt, synthetic construct
  source 1..20: mol_type = other RNA
acagaaagatgtcaataacg

SEQ ID NO: 8390 - RNA, 20 nt, synthetic construct
  source 1..20: mol_type = other RNA
acagagggcttcctctttgg

SEQ ID NO: 8391 - RNA, 20 nt, synthetic construct
  source 1..20: mol_type = other RNA
acagagggtgcagagcggga

SEQ ID NO: 8392 - RNA, 20 nt, synthetic construct
  source 1..20: mol_type = other RNA
acagatgaagaaactaaggc

SEQ ID NO: 8393 - RNA, 20 nt, synthetic construct
  source 1..20: mol_type = other RNA
acagcacgcgacgtttgtag

SEQ ID NO: 8394 - RNA, 20 nt, synthetic construct
  source 1..20: mol_type = other RNA
acagccaaaaggcatgcgct

SEQ ID NO: 8395 - RNA, 20 nt, synthetic construct
  source 1..20: mol_type = other RNA
acagccaagcattctacaaa

SEQ ID NO: 8396 - RNA, 20 nt, synthetic construct
  source 1..20: mol_type = other RNA
acagcgagggccacagaggg

SEQ ID NO: 8397 - RNA, 20 nt, synthetic construct
  source 1..20: mol_type = other RNA
acagctctccagtctaaggg

SEQ ID NO: 8398 - RNA, 20 nt, synthetic construct
  source 1..20: mol_type = other RNA
acaggcgtaagctaccacgc

SEQ ID NO: 8399 - RNA, 20 nt, synthetic construct
  source 1..20: mol_type = other RNA
acaggcttacccgggcgacg

SEQ ID NO: 8400 - RNA, 20 nt, synthetic construct
  source 1..20: mol_type = other RNA
acagggcccatgccgcccag

SEQ ID NO: 8401 - RNA, 20 nt, synthetic construct
  source 1..20: mol_type = other RNA
acaggggataaatggcagca

SEQ ID NO: 8402 - RNA, 20 nt, synthetic construct
  source 1..20: mol_type = other RNA
acagtacatcttggaaacaa

SEQ ID NO: 8403 - RNA, 20 nt, synthetic construct
  source 1..20: mol_type = other RNA
acagttatcttccgccatag

SEQ ID NO: 8404 - RNA, 20 nt, synthetic construct
  source 1..20: mol_type = other RNA
acataaagtccttggcacac

SEQ ID NO: 8405 - RNA, 20 nt, synthetic construct
  source 1..20: mol_type = other RNA
acatagacccagaggtgcta

SEQ ID NO: 8406 - RNA, 20 nt, synthetic construct
  source 1..20: mol_type = other RNA
acatcttggaaacaaccagg

SEQ ID NO: 8407 - RNA, 20 nt, synthetic construct
  source 1..20: mol_type = other RNA
acatctttctgtgtgccaag

SEQ ID NO: 8408 - RNA, 20 nt, synthetic construct
  source 1..20: mol_type = other RNA
acatgagggggttgggcgtg

SEQ ID NO: 8409 - RNA, 20 nt, synthetic construct
  source 1..20: mol_type = other RNA
acatgcgaacttagcgggcg

SEQ ID NO: 8410 - RNA, 20 nt, synthetic construct
  source 1..20: mol_type = other RNA
acatggtgaagcctggtctc

SEQ ID NO: 8411 - RNA, 20 nt, synthetic construct
  source 1..20: mol_type = other RNA
acatgtgatgggaacaaata

SEQ ID NO: 8412 - RNA, 20 nt, synthetic construct
  source 1..20: mol_type = other RNA
accaaggagaacttggagaa

SEQ ID NO: 8413 - RNA, 20 nt, synthetic construct
  source 1..20: mol_type = other RNA
accacacccggctaattttt

SEQ ID NO: 8414 - RNA, 20 nt, synthetic construct
  source 1..20: mol_type = other RNA
accacaggcacgagccacca

SEQ ID NO: 8415 - RNA, 20 nt, synthetic construct
  source 1..20: mol_type = other RNA
accacagggcccatgccgcc

SEQ ID NO: 8416 - RNA, 20 nt, synthetic construct
  source 1..20: mol_type = other RNA
accacgcccaaccccctcat

SEQ ID NO: 8417 - RNA, 20 nt, synthetic construct
  source 1..20: mol_type = other RNA
accagagcgggagggtagga

SEQ ID NO: 8418 - RNA, 20 nt, synthetic construct
  source 1..20: mol_type = other RNA
accaggcaaagagccaaaga

SEQ ID NO: 8419 - RNA, 20 nt, synthetic construct
  source 1..20: mol_type = other RNA
accagggcttttgcgggagc

SEQ ID NO: 8420 - RNA, 20 nt, synthetic construct
  source 1..20: mol_type = other RNA
accatagtagttatctatgg

SEQ ID NO: 8421 - RNA, 20 nt, synthetic construct
  source 1..20: mol_type = other RNA
acccagaggtgctaggacat

SEQ ID NO: 8422 - RNA, 20 nt, synthetic construct
  source 1..20: mol_type = other RNA
accccaagcgcccctccacg

SEQ ID NO: 8423 - RNA, 20 nt, synthetic construct
  source 1..20: mol_type = other RNA
accccctcatgttttcaaaa

SEQ ID NO: 8424 - RNA, 20 nt, synthetic construct
  source 1..20: mol_type = other RNA
acccccttccccactcccag

SEQ ID NO: 8425 - RNA, 20 nt, synthetic construct
  source 1..20: mol_type = other RNA
accccgccgcttccccgaga

SEQ ID NO: 8426 - RNA, 20 nt, synthetic construct
  source 1..20: mol_type = other RNA
acccggctaatttttgttat

SEQ ID NO: 8427 - RNA, 20 nt, synthetic construct
  source 1..20: mol_type = other RNA
acccgggacgcgcgctactt

SEQ ID NO: 8428 - RNA, 20 nt, synthetic construct
  source 1..20: mol_type = other RNA
acccgtcccccactccagct

SEQ ID NO: 8429 - RNA, 20 nt, synthetic construct
  source 1..20: mol_type = other RNA
acccgttattgacatctttc

SEQ ID NO: 8430 - RNA, 20 nt, synthetic construct
  source 1..20: mol_type = other RNA
accctcccccaacctcggcg

SEQ ID NO: 8431 - RNA, 20 nt, synthetic construct
  source 1..20: mol_type = other RNA
accctcccgctctggtcctt

SEQ ID NO: 8432 - RNA, 20 nt, synthetic construct
  source 1..20: mol_type = other RNA
accctcccgtcgccgtaggc

SEQ ID NO: 8433 - RNA, 20 nt, synthetic construct
  source 1..20: mol_type = other RNA
accctctgtggccctcgctg

SEQ ID NO: 8434 - RNA, 20 nt, synthetic construct
  source 1..20: mol_type = other RNA
accgaaagtaagaggcacag

SEQ ID NO: 8435 - RNA, 20 nt, synthetic construct
  source 1..20: mol_type = other RNA
accgagattttaagaaactt

SEQ ID NO: 8436 - RNA, 20 nt, synthetic construct
  source 1..20: mol_type = other RNA
accgctttgtatcacagcca

SEQ ID NO: 8437 - RNA, 20 nt, synthetic construct
  source 1..20: mol_type = other RNA
accggagcagctgggaccac

SEQ ID NO: 8438 - RNA, 20 nt, synthetic construct
  source 1..20: mol_type = other RNA
accgtggggaggaaacagca

SEQ ID NO: 8439 - RNA, 20 nt, synthetic construct
  source 1..20: mol_type = other RNA
acctcaagccatcctcccgc

SEQ ID NO: 8440 - RNA, 20 nt, synthetic construct
  source 1..20: mol_type = other RNA
acctcagcgccgcgcctttg

SEQ ID NO: 8441 - RNA, 20 nt, synthetic construct
  source 1..20: mol_type = other RNA
acctcggcgctctgacgctt

SEQ ID NO: 8442 - RNA, 20 nt, synthetic construct
  source 1..20: mol_type = other RNA
acctctgggtctatgtgggg

SEQ ID NO: 8443 - RNA, 20 nt, synthetic construct
  source 1..20: mol_type = other RNA
acctttggcctacggcgacg

SEQ ID NO: 8444 - RNA, 20 nt, synthetic construct
  source 1..20: mol_type = other RNA
acgaaaagaccacagggccc

SEQ ID NO: 8445 - RNA, 20 nt, synthetic construct
  source 1..20: mol_type = other RNA
acgaagtccacagctctcca

SEQ ID NO: 8446 - RNA, 20 nt, synthetic construct
  source 1..20: mol_type = other RNA
acgaattacagccaaaaggc

SEQ ID NO: 8447 - RNA, 20 nt, synthetic construct
  source 1..20: mol_type = other RNA
acgagcctacccgtccccca

SEQ ID NO: 8448 - RNA, 20 nt, synthetic construct
  source 1..20: mol_type = other RNA
acgcaaagcacataaagtcc

SEQ ID NO: 8449 - RNA, 20 nt, synthetic construct
  source 1..20: mol_type = other RNA
acgcagaaggcaggcgtttt

SEQ ID NO: 8450 - RNA, 20 nt, synthetic construct
  source 1..20: mol_type = other RNA
acgcccaaccccctcatgtt

SEQ ID NO: 8451 - RNA, 20 nt, synthetic construct
  source 1..20: mol_type = other RNA
acgccctaaactttgtcccg

SEQ ID NO: 8452 - RNA, 20 nt, synthetic construct
  source 1..20: mol_type = other RNA
acgcctcccccagaccccaa

SEQ ID NO: 8453 - RNA, 20 nt, synthetic construct
  source 1..20: mol_type = other RNA
acgcctgccttctgcgtgag

SEQ ID NO: 8454 - RNA, 20 nt, synthetic construct
  source 1..20: mol_type = other RNA
acgcgacgtttgtagaatgc

SEQ ID NO: 8455 - RNA, 20 nt, synthetic construct
  source 1..20: mol_type = other RNA
acgcgcgctacttgcccctt

SEQ ID NO: 8456 - RNA, 20 nt, synthetic construct
  source 1..20: mol_type = other RNA
acgcgtggaggggcgcttgg

SEQ ID NO: 8457 - RNA, 20 nt, synthetic construct
  source 1..20: mol_type = other RNA
acgcgttcacaaacctcagc

SEQ ID NO: 8458 - RNA, 20 nt, synthetic construct
  source 1..20: mol_type = other RNA
acgctggagtgcactggcgc

SEQ ID NO: 8459 - RNA, 20 nt, synthetic construct
  source 1..20: mol_type = other RNA
acgcttatcgacgccctaaa

SEQ ID NO: 8460 - RNA, 20 nt, synthetic construct
  source 1..20: mol_type = other RNA
acggacctcaagccatcctc

SEQ ID NO: 8461 - RNA, 20 nt, synthetic construct
  source 1..20: mol_type = other RNA
acggagcgagagagcacagc

SEQ ID NO: 8462 - RNA, 20 nt, synthetic construct
  source 1..20: mol_type = other RNA
acggcgacgggagggtcggg

SEQ ID NO: 8463 - RNA, 20 nt, synthetic construct
  source 1..20: mol_type = other RNA
acggcgggccaccaaggaga

SEQ ID NO: 8464 - RNA, 20 nt, synthetic construct
  source 1..20: mol_type = other RNA
acgggagggtcgggacaaag

SEQ ID NO: 8465 - RNA, 20 nt, synthetic construct
  source 1..20: mol_type = other RNA
acgggtaggctcgtcccaaa

SEQ ID NO: 8466 - RNA, 20 nt, synthetic construct
  source 1..20: mol_type = other RNA
acgggtagttcttataattt

SEQ ID NO: 8467 - RNA, 20 nt, synthetic construct
  source 1..20: mol_type = other RNA
acggtgtggccccacataga

SEQ ID NO: 8468 - RNA, 20 nt, synthetic construct
  source 1..20: mol_type = other RNA
acgtcgcgtgctgtttcctc

SEQ ID NO: 8469 - RNA, 20 nt, synthetic construct
  source 1..20: mol_type = other RNA
acgtttgtagaatgcttggc

SEQ ID NO: 8470 - RNA, 20 nt, synthetic construct
  source 1..20: mol_type = other RNA
actaaggcaccgagatttta

SEQ ID NO: 8471 - RNA, 20 nt, synthetic construct
  source 1..20: mol_type = other RNA
actacccgttattgacatct

SEQ ID NO: 8472 - RNA, 20 nt, synthetic construct
  source 1..20: mol_type = other RNA
actacggacctcaagccatc

SEQ ID NO: 8473 - RNA, 20 nt, synthetic construct
  source 1..20: mol_type = other RNA
actactatggttatcttctg

SEQ ID NO: 8474 - RNA, 20 nt, synthetic construct
  source 1..20: mol_type = other RNA
actagccccacggcgggcca

SEQ ID NO: 8475 - RNA, 20 nt, synthetic construct
  source 1..20: mol_type = other RNA
actatggttatcttctgcct

SEQ ID NO: 8476 - RNA, 20 nt, synthetic construct
  source 1..20: mol_type = other RNA
actccagctgcgctggggga

SEQ ID NO: 8477 - RNA, 20 nt, synthetic construct
  source 1..20: mol_type = other RNA
actcccaggccaccccgccg

SEQ ID NO: 8478 - RNA, 20 nt, synthetic construct
  source 1..20: mol_type = other RNA
actggagagctgtggacttc

SEQ ID NO: 8479 - RNA, 20 nt, synthetic construct
  source 1..20: mol_type = other RNA
actggcgccatgatagctca

SEQ ID NO: 8480 - RNA, 20 nt, synthetic construct
  source 1..20: mol_type = other RNA
actgggcggcatgggccctg

SEQ ID NO: 8481 - RNA, 20 nt, synthetic construct
  source 1..20: mol_type = other RNA
actgtgcctcttactttcgg

SEQ ID NO: 8482 - RNA, 20 nt, synthetic construct
  source 1..20: mol_type = other RNA
acttaattacacaggggata

SEQ ID NO: 8483 - RNA, 20 nt, synthetic construct
  source 1..20: mol_type = other RNA
acttagcgggcgcctagacg

SEQ ID NO: 8484 - RNA, 20 nt, synthetic construct
  source 1..20: mol_type = other RNA
acttagggaggccgaggcgg

SEQ ID NO: 8485 - RNA, 20 nt, synthetic construct
  source 1..20: mol_type = other RNA
acttatttgttcccatcaca

SEQ ID NO: 8486 - RNA, 20 nt, synthetic construct
  source 1..20: mol_type = other RNA
acttcaatctcgattgctgc

SEQ ID NO: 8487 - RNA, 20 nt, synthetic construct
  source 1..20: mol_type = other RNA
acttcccttctccaagttct

SEQ ID NO: 8488 - RNA, 20 nt, synthetic construct
  source 1..20: mol_type = other RNA
acttcgtctaggcgcccgct

SEQ ID NO: 8489 - RNA, 20 nt, synthetic construct
  source 1..20: mol_type = other RNA
acttgcccctttcggcgggg

SEQ ID NO: 8490 - RNA, 20 nt, synthetic construct
  source 1..20: mol_type = other RNA
acttggagaagggaagtcac

SEQ ID NO: 8491 - RNA, 20 nt, synthetic construct
  source 1..20: mol_type = other RNA
actttatgtgctttgcgtca

SEQ ID NO: 8492 - RNA, 20 nt, synthetic construct
  source 1..20: mol_type = other RNA
actttcggttttgaaaacat

SEQ ID NO: 8493 - RNA, 20 nt, synthetic construct
  source 1..20: mol_type = other RNA
actttgtcccgaccctcccg

SEQ ID NO: 8494 - RNA, 20 nt, synthetic construct
  source 1..20: mol_type = other RNA
agaaaaacgcctgccttctg

SEQ ID NO: 8495 - RNA, 20 nt, synthetic construct
  source 1..20: mol_type = other RNA
agaaaccctcccccaacctc

SEQ ID NO: 8496 - RNA, 20 nt, synthetic construct
  source 1..20: mol_type = other RNA
agaaactaaggcaccgagat

SEQ ID NO: 8497 - RNA, 20 nt, synthetic construct
  source 1..20: mol_type = other RNA
agaaacttaattacacaggg

SEQ ID NO: 8498 - RNA, 20 nt, synthetic construct
  source 1..20: mol_type = other RNA
agaaagatgtcaataacggg

SEQ ID NO: 8499 - RNA, 20 nt, synthetic construct
  source 1..20: mol_type = other RNA
agaactacccgttattgaca

SEQ ID NO: 8500 - RNA, 20 nt, synthetic construct
  source 1..20: mol_type = other RNA
agaacttggagaagggaagt

SEQ ID NO: 8501 - RNA, 20 nt, synthetic construct
  source 1..20: mol_type = other RNA
agaagataaccatagtagtt

SEQ ID NO: 8502 - RNA, 20 nt, synthetic construct
  source 1..20: mol_type = other RNA
agaaggcaggcgtttttctt

SEQ ID NO: 8503 - RNA, 20 nt, synthetic construct
  source 1..20: mol_type = other RNA
agaagggaagtcacggagcg

SEQ ID NO: 8504 - RNA, 20 nt, synthetic construct
  source 1..20: mol_type = other RNA
agaatctcacgcagaaggca

SEQ ID NO: 8505 - RNA, 20 nt, synthetic construct
  source 1..20: mol_type = other RNA
agaatgcttggctgtgatac

SEQ ID NO: 8506 - RNA, 20 nt, synthetic construct
  source 1..20: mol_type = other RNA
agacaggcttacccgggcga

SEQ ID NO: 8507 - RNA, 20 nt, synthetic construct
  source 1..20: mol_type = other RNA
agaccacagggcccatgccg

SEQ ID NO: 8508 - RNA, 20 nt, synthetic construct
  source 1..20: mol_type = other RNA
agacccagaggtgctaggac

SEQ ID NO: 8509 - RNA, 20 nt, synthetic construct
  source 1..20: mol_type = other RNA
agaccccaagcgcccctcca

SEQ ID NO: 8510 - RNA, 20 nt, synthetic construct
  source 1..20: mol_type = other RNA
agacctttggcctacggcga

SEQ ID NO: 8511 - RNA, 20 nt, synthetic construct
  source 1..20: mol_type = other RNA
agacgaagtccacagctctc

SEQ ID NO: 8512 - RNA, 20 nt, synthetic construct
  source 1..20: mol_type = other RNA
agactggagagctgtggact

SEQ ID NO: 8513 - RNA, 20 nt, synthetic construct
  source 1..20: mol_type = other RNA
agagaaaccctcccccaacc

SEQ ID NO: 8514 - RNA, 20 nt, synthetic construct
  source 1..20: mol_type = other RNA
agagagcacagcgagggcca

SEQ ID NO: 8515 - RNA, 20 nt, synthetic construct
  source 1..20: mol_type = other RNA
agagatcctcccgcctcagc

SEQ ID NO: 8516 - RNA, 20 nt, synthetic construct
  source 1..20: mol_type = other RNA
agagcaaactgggcggcatg

SEQ ID NO: 8517 - RNA, 20 nt, synthetic construct
  source 1..20: mol_type = other RNA
agagcacagcgagggccaca

SEQ ID NO: 8518 - RNA, 20 nt, synthetic construct
  source 1..20: mol_type = other RNA
agagccaaagaggaagccct

SEQ ID NO: 8519 - RNA, 20 nt, synthetic construct
  source 1..20: mol_type = other RNA
agagccgcagcagacaggct

SEQ ID NO: 8520 - RNA, 20 nt, synthetic construct
  source 1..20: mol_type = other RNA
agagcgccgaggttggggga

SEQ ID NO: 8521 - RNA, 20 nt, synthetic construct
  source 1..20: mol_type = other RNA
agagcggaagagaaaccctc

SEQ ID NO: 8522 - RNA, 20 nt, synthetic construct
  source 1..20: mol_type = other RNA
agagcgggagaggaaggacc

SEQ ID NO: 8523 - RNA, 20 nt, synthetic construct
  source 1..20: mol_type = other RNA
agagctgtggacttcgtcta

SEQ ID NO: 8524 - RNA, 20 nt, synthetic construct
  source 1..20: mol_type = other RNA
agaggaagccctctgtacga

SEQ ID NO: 8525 - RNA, 20 nt, synthetic construct
  source 1..20: mol_type = other RNA
agaggaaggaccagagcggg

SEQ ID NO: 8526 - RNA, 20 nt, synthetic construct
  source 1..20: mol_type = other RNA
agaggcacagtacatcttgg

SEQ ID NO: 8527 - RNA, 20 nt, synthetic construct
  source 1..20: mol_type = other RNA
agaggcagaagataaccata

SEQ ID NO: 8528 - RNA, 20 nt, synthetic construct
  source 1..20: mol_type = other RNA
agaggccccgcgaaagagcg

SEQ ID NO: 8529 - RNA, 20 nt, synthetic construct
  source 1..20: mol_type = other RNA
agagggcttcctctttggct

SEQ ID NO: 8530 - RNA, 20 nt, synthetic construct
  source 1..20: mol_type = other RNA
agagggtgcagagcgggaga

SEQ ID NO: 8531 - RNA, 20 nt, synthetic construct
  source 1..20: mol_type = other RNA
agaggtgctaggacatgcga

SEQ ID NO: 8532 - RNA, 20 nt, synthetic construct
  source 1..20: mol_type = other RNA
agataaccatagtagttatc

SEQ ID NO: 8533 - RNA, 20 nt, synthetic construct
  source 1..20: mol_type = other RNA
agataactactatggttatc

SEQ ID NO: 8534 - RNA, 20 nt, synthetic construct
  source 1..20: mol_type = other RNA
agatccagccctggactagc

SEQ ID NO: 8535 - RNA, 20 nt, synthetic construct
  source 1..20: mol_type = other RNA
agatcctcccgcctcagcca

SEQ ID NO: 8536 - RNA, 20 nt, synthetic construct
  source 1..20: mol_type = other RNA
agatgaagaaactaaggcac

SEQ ID NO: 8537 - RNA, 20 nt, synthetic construct
  source 1..20: mol_type = other RNA
agatgtactgtgcctcttac

SEQ ID NO: 8538 - RNA, 20 nt, synthetic construct
  source 1..20: mol_type = other RNA
agatgtcaataacgggtagt

SEQ ID NO: 8539 - RNA, 20 nt, synthetic construct
  source 1..20: mol_type = other RNA
agattctccagagcaaactg

SEQ ID NO: 8540 - RNA, 20 nt, synthetic construct
  source 1..20: mol_type = other RNA
agattgaagtcaagcctaac

SEQ ID NO: 8541 - RNA, 20 nt, synthetic construct
  source 1..20: mol_type = other RNA
agcaaactgggcggcatggg

SEQ ID NO: 8542 - RNA, 20 nt, synthetic construct
  source 1..20: mol_type = other RNA
agcaatcgagattgaagtca

SEQ ID NO: 8543 - RNA, 20 nt, synthetic construct
  source 1..20: mol_type = other RNA
agcacagcgagggccacaga

SEQ ID NO: 8544 - RNA, 20 nt, synthetic construct
  source 1..20: mol_type = other RNA
agcacataaagtccttggca

SEQ ID NO: 8545 - RNA, 20 nt, synthetic construct
  source 1..20: mol_type = other RNA
agcacctctgggtctatgtg

SEQ ID NO: 8546 - RNA, 20 nt, synthetic construct
  source 1..20: mol_type = other RNA
agcacgcgacgtttgtagaa

SEQ ID NO: 8547 - RNA, 20 nt, synthetic construct
  source 1..20: mol_type = other RNA
agcagacaggcttacccggg

SEQ ID NO: 8548 - RNA, 20 nt, synthetic construct
  source 1..20: mol_type = other RNA
agcagagccgcagcagacag

SEQ ID NO: 8549 - RNA, 20 nt, synthetic construct
  source 1..20: mol_type = other RNA
agcaggggagacctttggcc

SEQ ID NO: 8550 - RNA, 20 nt, synthetic construct
  source 1..20: mol_type = other RNA
agcattctacaaacgtcgcg

SEQ ID NO: 8551 - RNA, 20 nt, synthetic construct
  source 1..20: mol_type = other RNA
agccaaaaggcatgcgctcc

SEQ ID NO: 8552 - RNA, 20 nt, synthetic construct
  source 1..20: mol_type = other RNA
agccaaagaggaagccctct

SEQ ID NO: 8553 - RNA, 20 nt, synthetic construct
  source 1..20: mol_type = other RNA
agccaagcattctacaaacg

SEQ ID NO: 8554 - RNA, 20 nt, synthetic construct
  source 1..20: mol_type = other RNA
agccaccggagcagctggga

SEQ ID NO: 8555 - RNA, 20 nt, synthetic construct
  source 1..20: mol_type = other RNA
agccagaggccccgcgaaag

SEQ ID NO: 8556 - RNA, 20 nt, synthetic construct
  source 1..20: mol_type = other RNA
agccatcctcccgcctcggc

SEQ ID NO: 8557 - RNA, 20 nt, synthetic construct
  source 1..20: mol_type = other RNA
agccccacggcgggccacca

SEQ ID NO: 8558 - RNA, 20 nt, synthetic construct
  source 1..20: mol_type = other RNA
agccctctgtacgaaaagac

SEQ ID NO: 8559 - RNA, 20 nt, synthetic construct
  source 1..20: mol_type = other RNA
agccctggactagccccacg

SEQ ID NO: 8560 - RNA, 20 nt, synthetic construct
  source 1..20: mol_type = other RNA
agccctggttaggcttgact

SEQ ID NO: 8561 - RNA, 20 nt, synthetic construct
  source 1..20: mol_type = other RNA
agccgcagcagacaggctta

SEQ ID NO: 8562 - RNA, 20 nt, synthetic construct
  source 1..20: mol_type = other RNA
agccgggtgtggtggctcgt

SEQ ID NO: 8563 - RNA, 20 nt, synthetic construct
  source 1..20: mol_type = other RNA
agcctaaccagggcttttgc

SEQ ID NO: 8564 - RNA, 20 nt, synthetic construct
  source 1..20: mol_type = other RNA
agcctaagctcaagagatcc

SEQ ID NO: 8565 - RNA, 20 nt, synthetic construct
  source 1..20: mol_type = other RNA
agcctacccgtcccccactc

SEQ ID NO: 8566 - RNA, 20 nt, synthetic construct
  source 1..20: mol_type = other RNA
agcctggtctctacaaaaaa

SEQ ID NO: 8567 - RNA, 20 nt, synthetic construct
  source 1..20: mol_type = other RNA
agcctgtctgctgcggctct

SEQ ID NO: 8568 - RNA, 20 nt, synthetic construct
  source 1..20: mol_type = other RNA
agcgagagagcacagcgagg

SEQ ID NO: 8569 - RNA, 20 nt, synthetic construct
  source 1..20: mol_type = other RNA
agcgagggccacagagggtg

SEQ ID NO: 8570 - RNA, 20 nt, synthetic construct
  source 1..20: mol_type = other RNA
agcgcagctggagtggggga

SEQ ID NO: 8571 - RNA, 20 nt, synthetic construct
  source 1..20: mol_type = other RNA
agcgcatgccttttggctgt

SEQ ID NO: 8572 - RNA, 20 nt, synthetic construct
  source 1..20: mol_type = other RNA
agcgcccctccacgcgttca

SEQ ID NO: 8573 - RNA, 20 nt, synthetic construct
  source 1..20: mol_type = other RNA
agcgccgaggttgggggagg

SEQ ID NO: 8574 - RNA, 20 nt, synthetic construct
  source 1..20: mol_type = other RNA
agcgccgcgcctttgggacg

SEQ ID NO: 8575 - RNA, 20 nt, synthetic construct
  source 1..20: mol_type = other RNA
agcggaagagaaaccctccc

SEQ ID NO: 8576 - RNA, 20 nt, synthetic construct
  source 1..20: mol_type = other RNA
agcggcggggtggcctggga

SEQ ID NO: 8577 - RNA, 20 nt, synthetic construct
  source 1..20: mol_type = other RNA
agcgggagaggaaggaccag

SEQ ID NO: 8578 - RNA, 20 nt, synthetic construct
  source 1..20: mol_type = other RNA
agcgggcgcctagacgaagt

SEQ ID NO: 8579 - RNA, 20 nt, synthetic construct
  source 1..20: mol_type = other RNA
agcggtttcgaataattaac

SEQ ID NO: 8580 - RNA, 20 nt, synthetic construct
  source 1..20: mol_type = other RNA
agcgtcagagcgccgaggtt

SEQ ID NO: 8581 - RNA, 20 nt, synthetic construct
  source 1..20: mol_type = other RNA
agctaccacgcccaaccccc

SEQ ID NO: 8582 - RNA, 20 nt, synthetic construct
  source 1..20: mol_type = other RNA
agctatcatggcgccagtgc

SEQ ID NO: 8583 - RNA, 20 nt, synthetic construct
  source 1..20: mol_type = other RNA
agctcaaaagcctaagctca

SEQ ID NO: 8584 - RNA, 20 nt, synthetic construct
  source 1..20: mol_type = other RNA
agctctccagtctaagggaa

SEQ ID NO: 8585 - RNA, 20 nt, synthetic construct
  source 1..20: mol_type = other RNA
agctgcgctgggggagccag

SEQ ID NO: 8586 - RNA, 20 nt, synthetic construct
  source 1..20: mol_type = other RNA
agctgctccggtggctgagg

SEQ ID NO: 8587 - RNA, 20 nt, synthetic construct
  source 1..20: mol_type = other RNA
agctggagtgggggacgggt

SEQ ID NO: 8588 - RNA, 20 nt, synthetic construct
  source 1..20: mol_type = other RNA
agctgtggacttcgtctagg

SEQ ID NO: 8589 - RNA, 20 nt, synthetic construct
  source 1..20: mol_type = other RNA
agcttaggcttttgagctat

SEQ ID NO: 8590 - RNA, 20 nt, synthetic construct
  source 1..20: mol_type = other RNA
aggaaacagcacgcgacgtt

SEQ ID NO: 8591 - RNA, 20 nt, synthetic construct
  source 1..20: mol_type = other RNA
aggaagccctctgtacgaaa

SEQ ID NO: 8592 - RNA, 20 nt, synthetic construct
  source 1..20: mol_type = other RNA
aggaaggaccagagcgggag

SEQ ID NO: 8593 - RNA, 20 nt, synthetic construct
  source 1..20: mol_type = other RNA
aggacatgcgaacttagcgg

SEQ ID NO: 8594 - RNA, 20 nt, synthetic construct
  source 1..20: mol_type = other RNA
aggaccagagcgggagggta

SEQ ID NO: 8595 - RNA, 20 nt, synthetic construct
  source 1..20: mol_type = other RNA
aggactttatgtgctttgcg

SEQ ID NO: 8596 - RNA, 20 nt, synthetic construct
  source 1..20: mol_type = other RNA
aggagaacttggagaaggga

SEQ ID NO: 8597 - RNA, 20 nt, synthetic construct
  source 1..20: mol_type = other RNA
aggatctcttgagcttaggc

SEQ ID NO: 8598 - RNA, 20 nt, synthetic construct
  source 1..20: mol_type = other RNA
aggatggcttgaggtccgta

SEQ ID NO: 8599 - RNA, 20 nt, synthetic construct
  source 1..20: mol_type = other RNA
aggcaaagagccaaagagga

SEQ ID NO: 8600 - RNA, 20 nt, synthetic construct
  source 1..20: mol_type = other RNA
aggcacagtacatcttggaa

SEQ ID NO: 8601 - RNA, 20 nt, synthetic construct
  source 1..20: mol_type = other RNA
aggcaccgagattttaagaa

SEQ ID NO: 8602 - RNA, 20 nt, synthetic construct
  source 1..20: mol_type = other RNA
aggcagaagataaccatagt

SEQ ID NO: 8603 - RNA, 20 nt, synthetic construct
  source 1..20: mol_type = other RNA
aggcaggcgtttttcttaaa

SEQ ID NO: 8604 - RNA, 20 nt, synthetic construct
  source 1..20: mol_type = other RNA
aggcatgcgctcccgcaaaa

SEQ ID NO: 8605 - RNA, 20 nt, synthetic construct
  source 1..20: mol_type = other RNA
aggccaaaggtctcccctgc

SEQ ID NO: 8606 - RNA, 20 nt, synthetic construct
  source 1..20: mol_type = other RNA
aggccaccccgccgcttccc

SEQ ID NO: 8607 - RNA, 20 nt, synthetic construct
  source 1..20: mol_type = other RNA
aggccccgcgaaagagcgga

SEQ ID NO: 8608 - RNA, 20 nt, synthetic construct
  source 1..20: mol_type = other RNA
aggccgaggcgggaggatgg

SEQ ID NO: 8609 - RNA, 20 nt, synthetic construct
  source 1..20: mol_type = other RNA
aggcgcccgctaagttcgca

SEQ ID NO: 8610 - RNA, 20 nt, synthetic construct
  source 1..20: mol_type = other RNA
aggcgcggcgctgaggtttg

SEQ ID NO: 8611 - RNA, 20 nt, synthetic construct
  source 1..20: mol_type = other RNA
aggcgggaggatctcttgag

SEQ ID NO: 8612 - RNA, 20 nt, synthetic construct
  source 1..20: mol_type = other RNA
aggcgggaggatggcttgag

SEQ ID NO: 8613 - RNA, 20 nt, synthetic construct
  source 1..20: mol_type = other RNA
aggcgtaagctaccacgccc

SEQ ID NO: 8614 - RNA, 20 nt, synthetic construct
  source 1..20: mol_type = other RNA
aggcgtcgcccgggtaagcc

SEQ ID NO: 8615 - RNA, 20 nt, synthetic construct
  source 1..20: mol_type = other RNA
aggctcgtcccaaaggcgcg

SEQ ID NO: 8616 - RNA, 20 nt, synthetic construct
  source 1..20: mol_type = other RNA
aggctggtctcaactacgga

SEQ ID NO: 8617 - RNA, 20 nt, synthetic construct
  source 1..20: mol_type = other RNA
aggcttacccgggcgacgcc

SEQ ID NO: 8618 - RNA, 20 nt, synthetic construct
  source 1..20: mol_type = other RNA
aggcttgacttcaatctcga

SEQ ID NO: 8619 - RNA, 20 nt, synthetic construct
  source 1..20: mol_type = other RNA
aggcttttgagctatcatgg

SEQ ID NO: 8620 - RNA, 20 nt, synthetic construct
  source 1..20: mol_type = other RNA
agggaagcagagccgcagca

SEQ ID NO: 8621 - RNA, 20 nt, synthetic construct
  source 1..20: mol_type = other RNA
agggaagtcacggagcgaga

SEQ ID NO: 8622 - RNA, 20 nt, synthetic construct
  source 1..20: mol_type = other RNA
agggaggccgaggcgggagg

SEQ ID NO: 8623 - RNA, 20 nt, synthetic construct
  source 1..20: mol_type = other RNA
agggccacagagggtgcaga

SEQ ID NO: 8624 - RNA, 20 nt, synthetic construct
  source 1..20: mol_type = other RNA
agggcccatgccgcccagtt

SEQ ID NO: 8625 - RNA, 20 nt, synthetic construct
  source 1..20: mol_type = other RNA
agggcgtcgataagcgtcag

SEQ ID NO: 8626 - RNA, 20 nt, synthetic construct
  source 1..20: mol_type = other RNA
agggctggatctcggggaag

SEQ ID NO: 8627 - RNA, 20 nt, synthetic construct
  source 1..20: mol_type = other RNA
agggcttcctctttggctct

SEQ ID NO: 8628 - RNA, 20 nt, synthetic construct
  source 1..20: mol_type = other RNA
agggcttttgcgggagcgca

SEQ ID NO: 8629 - RNA, 20 nt, synthetic construct
  source 1..20: mol_type = other RNA
aggggagacctttggcctac

SEQ ID NO: 8630 - RNA, 20 nt, synthetic construct
  source 1..20: mol_type = other RNA
aggggataaatggcagcaat

SEQ ID NO: 8631 - RNA, 20 nt, synthetic construct
  source 1..20: mol_type = other RNA
aggggcaagtagcgcgcgtc

SEQ ID NO: 8632 - RNA, 20 nt, synthetic construct
  source 1..20: mol_type = other RNA
aggggcgcttggggtctggg

SEQ ID NO: 8633 - RNA, 20 nt, synthetic construct
  source 1..20: mol_type = other RNA
agggggtgcgcacccgggac

SEQ ID NO: 8634 - RNA, 20 nt, synthetic construct
  source 1..20: mol_type = other RNA
agggggttgggcgtggtagc

SEQ ID NO: 8635 - RNA, 20 nt, synthetic construct
  source 1..20: mol_type = other RNA
agggtcgggacaaagtttag

SEQ ID NO: 8636 - RNA, 20 nt, synthetic construct
  source 1..20: mol_type = other RNA
agggtgcagagcgggagagg

SEQ ID NO: 8637 - RNA, 20 nt, synthetic construct
  source 1..20: mol_type = other RNA
agggtttctcttccgctctt

SEQ ID NO: 8638 - RNA, 20 nt, synthetic construct
  source 1..20: mol_type = other RNA
aggtccgtagttgagaccag

SEQ ID NO: 8639 - RNA, 20 nt, synthetic construct
  source 1..20: mol_type = other RNA
aggtctcccctgctccccgc

SEQ ID NO: 8640 - RNA, 20 nt, synthetic construct
  source 1..20: mol_type = other RNA
aggtgctaggacatgcgaac

SEQ ID NO: 8641 - RNA, 20 nt, synthetic construct
  source 1..20: mol_type = other RNA
aggttgggggagggtttctc

SEQ ID NO: 8642 - RNA, 20 nt, synthetic construct
  source 1..20: mol_type = other RNA
aggtttgtgaacgcgtggag

SEQ ID NO: 8643 - RNA, 20 nt, synthetic construct
  source 1..20: mol_type = other RNA
agtaagaggcacagtacatc

SEQ ID NO: 8644 - RNA, 20 nt, synthetic construct
  source 1..20: mol_type = other RNA
agtacatcttggaaacaacc

SEQ ID NO: 8645 - RNA, 20 nt, synthetic construct
  source 1..20: mol_type = other RNA
agtagcgcgcgtcccgggtg

SEQ ID NO: 8646 - RNA, 20 nt, synthetic construct
  source 1..20: mol_type = other RNA
agtagttatctatggcggaa

SEQ ID NO: 8647 - RNA, 20 nt, synthetic construct
  source 1..20: mol_type = other RNA
agtcaagcctaaccagggct

SEQ ID NO: 8648 - RNA, 20 nt, synthetic construct
  source 1..20: mol_type = other RNA
agtcacggagcgagagagca

SEQ ID NO: 8649 - RNA, 20 nt, synthetic construct
  source 1..20: mol_type = other RNA
agtccacagctctccagtct

SEQ ID NO: 8650 - RNA, 20 nt, synthetic construct
  source 1..20: mol_type = other RNA
agtccagggctggatctcgg

SEQ ID NO: 8651 - RNA, 20 nt, synthetic construct
  source 1..20: mol_type = other RNA
agtccttggcacacagaaag

SEQ ID NO: 8652 - RNA, 20 nt, synthetic construct
  source 1..20: mol_type = other RNA
agtctaagggaagcagagcc

SEQ ID NO: 8653 - RNA, 20 nt, synthetic construct
  source 1..20: mol_type = other RNA
agtctctcctaccctcccgc

SEQ ID NO: 8654 - RNA, 20 nt, synthetic construct
  source 1..20: mol_type = other RNA
agtgacatgtgatgggaaca

SEQ ID NO: 8655 - RNA, 20 nt, synthetic construct
  source 1..20: mol_type = other RNA
agtgcactccagcgtgggca

SEQ ID NO: 8656 - RNA, 20 nt, synthetic construct
  source 1..20: mol_type = other RNA
agtgcactggcgccatgata

SEQ ID NO: 8657 - RNA, 20 nt, synthetic construct
  source 1..20: mol_type = other RNA
agtggggaagggggtgcgca

SEQ ID NO: 8658 - RNA, 20 nt, synthetic construct
  source 1..20: mol_type = other RNA
agtgggggacgggtaggctc

SEQ ID NO: 8659 - RNA, 20 nt, synthetic construct
  source 1..20: mol_type = other RNA
agttaattattcgaaaccgc

SEQ ID NO: 8660 - RNA, 20 nt, synthetic construct
  source 1..20: mol_type = other RNA
agttatctatggcggaagat

SEQ ID NO: 8661 - RNA, 20 nt, synthetic construct
  source 1..20: mol_type = other RNA
agttatcttccgccatagat

SEQ ID NO: 8662 - RNA, 20 nt, synthetic construct
  source 1..20: mol_type = other RNA
agttcgcatgtcctagcacc

SEQ ID NO: 8663 - RNA, 20 nt, synthetic construct
  source 1..20: mol_type = other RNA
agttctccttggtggcccgc

SEQ ID NO: 8664 - RNA, 20 nt, synthetic construct
  source 1..20: mol_type = other RNA
agtttagggcgtcgataagc

SEQ ID NO: 8665 - RNA, 20 nt, synthetic construct
  source 1..20: mol_type = other RNA
agtttcttaaaatctcggtg

SEQ ID NO: 8666 - RNA, 20 nt, synthetic construct
  source 1..20: mol_type = other RNA
agtttcttcatctgtgagag

SEQ ID NO: 8667 - RNA, 20 nt, synthetic construct
  source 1..20: mol_type = other RNA
agtttgctctggagaatctc

SEQ ID NO: 8668 - RNA, 20 nt, synthetic construct
  source 1..20: mol_type = other RNA
ataaagtccttggcacacag

SEQ ID NO: 8669 - RNA, 20 nt, synthetic construct
  source 1..20: mol_type = other RNA
ataaatggcagcaatcgaga

SEQ ID NO: 8670 - RNA, 20 nt, synthetic construct
  source 1..20: mol_type = other RNA
ataaccatagtagttatcta

SEQ ID NO: 8671 - RNA, 20 nt, synthetic construct
  source 1..20: mol_type = other RNA
ataacgggtagttcttataa

SEQ ID NO: 8672 - RNA, 20 nt, synthetic construct
  source 1..20: mol_type = other RNA
ataactactatggttatctt

SEQ ID NO: 8673 - RNA, 20 nt, synthetic construct
  source 1..20: mol_type = other RNA
ataagaactacccgttattg

SEQ ID NO: 8674 - RNA, 20 nt, synthetic construct
  source 1..20: mol_type = other RNA
ataagcgtcagagcgccgag

SEQ ID NO: 8675 - RNA, 20 nt, synthetic construct
  source 1..20: mol_type = other RNA
ataataacaaaaattagccg

SEQ ID NO: 8676 - RNA, 20 nt, synthetic construct
  source 1..20: mol_type = other RNA
atacaaagcggtttcgaata

SEQ ID NO: 8677 - RNA, 20 nt, synthetic construct
  source 1..20: mol_type = other RNA
atagacccagaggtgctagg

SEQ ID NO: 8678 - RNA, 20 nt, synthetic construct
  source 1..20: mol_type = other RNA
atagataactactatggtta

SEQ ID NO: 8679 - RNA, 20 nt, synthetic construct
  source 1..20: mol_type = other RNA
atagctcaaaagcctaagct

SEQ ID NO: 8680 - RNA, 20 nt, synthetic construct
  source 1..20: mol_type = other RNA
atagtagttatctatggcgg

SEQ ID NO: 8681 - RNA, 20 nt, synthetic construct
  source 1..20: mol_type = other RNA
atcacagccaagcattctac

SEQ ID NO: 8682 - RNA, 20 nt, synthetic construct
  source 1..20: mol_type = other RNA
atcacatgtcacttttaaaa

SEQ ID NO: 8683 - RNA, 20 nt, synthetic construct
  source 1..20: mol_type = other RNA
atcatggcgccagtgcactc

SEQ ID NO: 8684 - RNA, 20 nt, synthetic construct
  source 1..20: mol_type = other RNA
atccagccctggactagccc

SEQ ID NO: 8685 - RNA, 20 nt, synthetic construct
  source 1..20: mol_type = other RNA
atcccctgtgtaattaagtt

SEQ ID NO: 8686 - RNA, 20 nt, synthetic construct
  source 1..20: mol_type = other RNA
atcctcccgcctcagccacc

SEQ ID NO: 8687 - RNA, 20 nt, synthetic construct
  source 1..20: mol_type = other RNA
atcgacgccctaaactttgt

SEQ ID NO: 8688 - RNA, 20 nt, synthetic construct
  source 1..20: mol_type = other RNA
atcgagattgaagtcaagcc

SEQ ID NO: 8689 - RNA, 20 nt, synthetic construct
  source 1..20: mol_type = other RNA
atctatggcggaagataact

SEQ ID NO: 8690 - RNA, 20 nt, synthetic construct
  source 1..20: mol_type = other RNA
atctcacgcagaaggcaggc

SEQ ID NO: 8691 - RNA, 20 nt, synthetic construct
  source 1..20: mol_type = other RNA
atctcgattgctgccattta

SEQ ID NO: 8692 - RNA, 20 nt, synthetic construct
  source 1..20: mol_type = other RNA
atctcggggaagcggcgggg

SEQ ID NO: 8693 - RNA, 20 nt, synthetic construct
  source 1..20: mol_type = other RNA
atctcggtgccttagtttct

SEQ ID NO: 8694 - RNA, 20 nt, synthetic construct
  source 1..20: mol_type = other RNA
atctcttgagcttaggcttt

SEQ ID NO: 8695 - RNA, 20 nt, synthetic construct
  source 1..20: mol_type = other RNA
atctgtgagaggcagaagat

SEQ ID NO: 8696 - RNA, 20 nt, synthetic construct
  source 1..20: mol_type = other RNA
atcttccgccatagataact

SEQ ID NO: 8697 - RNA, 20 nt, synthetic construct
  source 1..20: mol_type = other RNA
atcttctgcctctcacagat

SEQ ID NO: 8698 - RNA, 20 nt, synthetic construct
  source 1..20: mol_type = other RNA
atcttggaaacaaccaggca

SEQ ID NO: 8699 - RNA, 20 nt, synthetic construct
  source 1..20: mol_type = other RNA
atctttctgtgtgccaagga

SEQ ID NO: 8700 - RNA, 20 nt, synthetic construct
  source 1..20: mol_type = other RNA
atgaagaaactaaggcaccg

SEQ ID NO: 8701 - RNA, 20 nt, synthetic construct
  source 1..20: mol_type = other RNA
atgacgcaaagcacataaag

SEQ ID NO: 8702 - RNA, 20 nt, synthetic construct
  source 1..20: mol_type = other RNA
atgagggggttgggcgtggt

SEQ ID NO: 8703 - RNA, 20 nt, synthetic construct
  source 1..20: mol_type = other RNA
atgatagctcaaaagcctaa

SEQ ID NO: 8704 - RNA, 20 nt, synthetic construct
  source 1..20: mol_type = other RNA
atgcacgaattacagccaaa

SEQ ID NO: 8705 - RNA, 20 nt, synthetic construct
  source 1..20: mol_type = other RNA
atgccgcccagtttgctctg

SEQ ID NO: 8706 - RNA, 20 nt, synthetic construct
  source 1..20: mol_type = other RNA
atgccttttggctgtaattc

SEQ ID NO: 8707 - RNA, 20 nt, synthetic construct
  source 1..20: mol_type = other RNA
atgcgaacttagcgggcgcc

SEQ ID NO: 8708 - RNA, 20 nt, synthetic construct
  source 1..20: mol_type = other RNA
atgcgctcccgcaaaagccc

SEQ ID NO: 8709 - RNA, 20 nt, synthetic construct
  source 1..20: mol_type = other RNA
atgcttggctgtgatacaaa

SEQ ID NO: 8710 - RNA, 20 nt, synthetic construct
  source 1..20: mol_type = other RNA
atggcagcaatcgagattga

SEQ ID NO: 8711 - RNA, 20 nt, synthetic construct
  source 1..20: mol_type = other RNA
atggcgccagtgcactccag

SEQ ID NO: 8712 - RNA, 20 nt, synthetic construct
  source 1..20: mol_type = other RNA
atggcggaagataactgttt

SEQ ID NO: 8713 - RNA, 20 nt, synthetic construct
  source 1..20: mol_type = other RNA
atggcttgaggtccgtagtt

SEQ ID NO: 8714 - RNA, 20 nt, synthetic construct
  source 1..20: mol_type = other RNA
atgggaacaaataagttaat

SEQ ID NO: 8715 - RNA, 20 nt, synthetic construct
  source 1..20: mol_type = other RNA
atgggccctgtggtcttttc

SEQ ID NO: 8716 - RNA, 20 nt, synthetic construct
  source 1..20: mol_type = other RNA
atggtgaagcctggtctcta

SEQ ID NO: 8717 - RNA, 20 nt, synthetic construct
  source 1..20: mol_type = other RNA
atggttatcttctgcctctc

SEQ ID NO: 8718 - RNA, 20 nt, synthetic construct
  source 1..20: mol_type = other RNA
atgtactgtgcctcttactt

SEQ ID NO: 8719 - RNA, 20 nt, synthetic construct
  source 1..20: mol_type = other RNA
atgtcaataacgggtagttc

SEQ ID NO: 8720 - RNA, 20 nt, synthetic construct
  source 1..20: mol_type = other RNA
atgtcctagcacctctgggt

SEQ ID NO: 8721 - RNA, 20 nt, synthetic construct
  source 1..20: mol_type = other RNA
atgtgatgggaacaaataag

SEQ ID NO: 8722 - RNA, 20 nt, synthetic construct
  source 1..20: mol_type = other RNA
atgtgctttgcgtcatttaa

SEQ ID NO: 8723 - RNA, 20 nt, synthetic construct
  source 1..20: mol_type = other RNA
atgtggggccacaccgtggg

SEQ ID NO: 8724 - RNA, 20 nt, synthetic construct
  source 1..20: mol_type = other RNA
atgttggccaggctggtctc

SEQ ID NO: 8725 - RNA, 20 nt, synthetic construct
  source 1..20: mol_type = other RNA
atgttttcaaaaccgaaagt

SEQ ID NO: 8726 - RNA, 20 nt, synthetic construct
  source 1..20: mol_type = other RNA
attaaatgacgcaaagcaca

SEQ ID NO: 8727 - RNA, 20 nt, synthetic construct
  source 1..20: mol_type = other RNA
attaacttatttgttcccat

SEQ ID NO: 8728 - RNA, 20 nt, synthetic construct
  source 1..20: mol_type = other RNA
attacacaggggataaatgg

SEQ ID NO: 8729 - RNA, 20 nt, synthetic construct
  source 1..20: mol_type = other RNA
attacagccaaaaggcatgc

SEQ ID NO: 8730 - RNA, 20 nt, synthetic construct
  source 1..20: mol_type = other RNA
attacaggcgtaagctacca

SEQ ID NO: 8731 - RNA, 20 nt, synthetic construct
  source 1..20: mol_type = other RNA
attataagaactacccgtta

SEQ ID NO: 8732 - RNA, 20 nt, synthetic construct
  source 1..20: mol_type = other RNA
attattcgaaaccgctttgt

SEQ ID NO: 8733 - RNA, 20 nt, synthetic construct
  source 1..20: mol_type = other RNA
attattttttgtagagacca

SEQ ID NO: 8734 - RNA, 20 nt, synthetic construct
  source 1..20: mol_type = other RNA
attcgaaaccgctttgtatc

SEQ ID NO: 8735 - RNA, 20 nt, synthetic construct
  source 1..20: mol_type = other RNA
attctacaaacgtcgcgtgc

SEQ ID NO: 8736 - RNA, 20 nt, synthetic construct
  source 1..20: mol_type = other RNA
attctccagagcaaactggg

SEQ ID NO: 8737 - RNA, 20 nt, synthetic construct
  source 1..20: mol_type = other RNA
attgaagtcaagcctaacca

SEQ ID NO: 8738 - RNA, 20 nt, synthetic construct
  source 1..20: mol_type = other RNA
attgacatctttctgtgtgc

SEQ ID NO: 8739 - RNA, 20 nt, synthetic construct
  source 1..20: mol_type = other RNA
attgctgccatttatcccct

SEQ ID NO: 8740 - RNA, 20 nt, synthetic construct
  source 1..20: mol_type = other RNA
atttatcccctgtgtaatta

SEQ ID NO: 8741 - RNA, 20 nt, synthetic construct
  source 1..20: mol_type = other RNA
atttgttcccatcacatgtc

SEQ ID NO: 8742 - RNA, 20 nt, synthetic construct
  source 1..20: mol_type = other RNA
attttttgtagagaccaggc

SEQ ID NO: 8743 - RNA, 20 nt, synthetic construct
  source 1..20: mol_type = other RNA
caaaaccgaaagtaagaggc

SEQ ID NO: 8744 - RNA, 20 nt, synthetic construct
  source 1..20: mol_type = other RNA
caaaagccctggttaggctt

SEQ ID NO: 8745 - RNA, 20 nt, synthetic construct
  source 1..20: mol_type = other RNA
caaaagcctaagctcaagag

SEQ ID NO: 8746 - RNA, 20 nt, synthetic construct
  source 1..20: mol_type = other RNA
caaaaggcatgcgctcccgc

SEQ ID NO: 8747 - RNA, 20 nt, synthetic construct
  source 1..20: mol_type = other RNA
caaaattaaatgacgcaaag

SEQ ID NO: 8748 - RNA, 20 nt, synthetic construct
  source 1..20: mol_type = other RNA
caaacctcagcgccgcgcct

SEQ ID NO: 8749 - RNA, 20 nt, synthetic construct
  source 1..20: mol_type = other RNA
caaacgtcgcgtgctgtttc

SEQ ID NO: 8750 - RNA, 20 nt, synthetic construct
  source 1..20: mol_type = other RNA
caaactgggcggcatgggcc

SEQ ID NO: 8751 - RNA, 20 nt, synthetic construct
  source 1..20: mol_type = other RNA
caaagagccaaagaggaagc

SEQ ID NO: 8752 - RNA, 20 nt, synthetic construct
  source 1..20: mol_type = other RNA
caaagaggaagccctctgta

SEQ ID NO: 8753 - RNA, 20 nt, synthetic construct
  source 1..20: mol_type = other RNA
caaagcacataaagtccttg

SEQ ID NO: 8754 - RNA, 20 nt, synthetic construct
  source 1..20: mol_type = other RNA
caaagcggtttcgaataatt

SEQ ID NO: 8755 - RNA, 20 nt, synthetic construct
  source 1..20: mol_type = other RNA
caaaggcgcggcgctgaggt

SEQ ID NO: 8756 - RNA, 20 nt, synthetic construct
  source 1..20: mol_type = other RNA
caaaggtctcccctgctccc

SEQ ID NO: 8757 - RNA, 20 nt, synthetic construct
  source 1..20: mol_type = other RNA
caaagtttagggcgtcgata

SEQ ID NO: 8758 - RNA, 20 nt, synthetic construct
  source 1..20: mol_type = other RNA
caacatggtgaagcctggtc

SEQ ID NO: 8759 - RNA, 20 nt, synthetic construct
  source 1..20: mol_type = other RNA
caaccaggcaaagagccaaa

SEQ ID NO: 8760 - RNA, 20 nt, synthetic construct
  source 1..20: mol_type = other RNA
caaccccctcatgttttcaa

SEQ ID NO: 8761 - RNA, 20 nt, synthetic construct
  source 1..20: mol_type = other RNA
caacctcggcgctctgacgc

SEQ ID NO: 8762 - RNA, 20 nt, synthetic construct
  source 1..20: mol_type = other RNA
caactacggacctcaagcca

SEQ ID NO: 8763 - RNA, 20 nt, synthetic construct
  source 1..20: mol_type = other RNA
caagagatcctcccgcctca

SEQ ID NO: 8764 - RNA, 20 nt, synthetic construct
  source 1..20: mol_type = other RNA
caagatgtactgtgcctctt

SEQ ID NO: 8765 - RNA, 20 nt, synthetic construct
  source 1..20: mol_type = other RNA
caagcattctacaaacgtcg

SEQ ID NO: 8766 - RNA, 20 nt, synthetic construct
  source 1..20: mol_type = other RNA
caagccatcctcccgcctcg

SEQ ID NO: 8767 - RNA, 20 nt, synthetic construct
  source 1..20: mol_type = other RNA
caagcctaaccagggctttt

SEQ ID NO: 8768 - RNA, 20 nt, synthetic construct
  source 1..20: mol_type = other RNA
caagcgcccctccacgcgtt

SEQ ID NO: 8769 - RNA, 20 nt, synthetic construct
  source 1..20: mol_type = other RNA
caaggactttatgtgctttg

SEQ ID NO: 8770 - RNA, 20 nt, synthetic construct
  source 1..20: mol_type = other RNA
caaggagaacttggagaagg

SEQ ID NO: 8771 - RNA, 20 nt, synthetic construct
  source 1..20: mol_type = other RNA
caagtagcgcgcgtcccggg

SEQ ID NO: 8772 - RNA, 20 nt, synthetic construct
  source 1..20: mol_type = other RNA
caagttctccttggtggccc

SEQ ID NO: 8773 - RNA, 20 nt, synthetic construct
  source 1..20: mol_type = other RNA
caataacgggtagttcttat

SEQ ID NO: 8774 - RNA, 20 nt, synthetic construct
  source 1..20: mol_type = other RNA
caatcgagattgaagtcaag

SEQ ID NO: 8775 - RNA, 20 nt, synthetic construct
  source 1..20: mol_type = other RNA
caatctcgattgctgccatt

SEQ ID NO: 8776 - RNA, 20 nt, synthetic construct
  source 1..20: mol_type = other RNA
cacaaacctcagcgccgcgc

SEQ ID NO: 8777 - RNA, 20 nt, synthetic construct
  source 1..20: mol_type = other RNA
cacacagaaagatgtcaata

SEQ ID NO: 8778 - RNA, 20 nt, synthetic construct
  source 1..20: mol_type = other RNA
cacacccggctaatttttgt

SEQ ID NO: 8779 - RNA, 20 nt, synthetic construct
  source 1..20: mol_type = other RNA
cacaccgtggggaggaaaca

SEQ ID NO: 8780 - RNA, 20 nt, synthetic construct
  source 1..20: mol_type = other RNA
cacagaaagatgtcaataac

SEQ ID NO: 8781 - RNA, 20 nt, synthetic construct
  source 1..20: mol_type = other RNA
cacagagggtgcagagcggg

SEQ ID NO: 8782 - RNA, 20 nt, synthetic construct
  source 1..20: mol_type = other RNA
cacagatgaagaaactaagg

SEQ ID NO: 8783 - RNA, 20 nt, synthetic construct
  source 1..20: mol_type = other RNA
cacagccaagcattctacaa

SEQ ID NO: 8784 - RNA, 20 nt, synthetic construct
  source 1..20: mol_type = other RNA
cacagcgagggccacagagg

SEQ ID NO: 8785 - RNA, 20 nt, synthetic construct
  source 1..20: mol_type = other RNA
cacagctctccagtctaagg

SEQ ID NO: 8786 - RNA, 20 nt, synthetic construct
  source 1..20: mol_type = other RNA
cacaggcacgagccaccaca

SEQ ID NO: 8787 - RNA, 20 nt, synthetic construct
  source 1..20: mol_type = other RNA
cacagggcccatgccgccca

SEQ ID NO: 8788 - RNA, 20 nt, synthetic construct
  source 1..20: mol_type = other RNA
cacaggggataaatggcagc

SEQ ID NO: 8789 - RNA, 20 nt, synthetic construct
  source 1..20: mol_type = other RNA
cacagtacatcttggaaaca

SEQ ID NO: 8790 - RNA, 20 nt, synthetic construct
  source 1..20: mol_type = other RNA
cacataaagtccttggcaca

SEQ ID NO: 8791 - RNA, 20 nt, synthetic construct
  source 1..20: mol_type = other RNA
cacatagacccagaggtgct

SEQ ID NO: 8792 - RNA, 20 nt, synthetic construct
  source 1..20: mol_type = other RNA
cacatgtcacttttaaaaaa

SEQ ID NO: 8793 - RNA, 20 nt, synthetic construct
  source 1..20: mol_type = other RNA
caccaaggagaacttggaga

SEQ ID NO: 8794 - RNA, 20 nt, synthetic construct
  source 1..20: mol_type = other RNA
caccacacccggctaatttt

SEQ ID NO: 8795 - RNA, 20 nt, synthetic construct
  source 1..20: mol_type = other RNA
cacccccttccccactccca

SEQ ID NO: 8796 - RNA, 20 nt, synthetic construct
  source 1..20: mol_type = other RNA
caccccgccgcttccccgag

SEQ ID NO: 8797 - RNA, 20 nt, synthetic construct
  source 1..20: mol_type = other RNA
cacccggctaatttttgtta

SEQ ID NO: 8798 - RNA, 20 nt, synthetic construct
  source 1..20: mol_type = other RNA
cacccgggacgcgcgctact

SEQ ID NO: 8799 - RNA, 20 nt, synthetic construct
  source 1..20: mol_type = other RNA
caccctctgtggccctcgct

SEQ ID NO: 8800 - RNA, 20 nt, synthetic construct
  source 1..20: mol_type = other RNA
caccgagattttaagaaact

SEQ ID NO: 8801 - RNA, 20 nt, synthetic construct
  source 1..20: mol_type = other RNA
caccggagcagctgggacca

SEQ ID NO: 8802 - RNA, 20 nt, synthetic construct
  source 1..20: mol_type = other RNA
caccgtggggaggaaacagc

SEQ ID NO: 8803 - RNA, 20 nt, synthetic construct
  source 1..20: mol_type = other RNA
cacctctgggtctatgtggg

SEQ ID NO: 8804 - RNA, 20 nt, synthetic construct
  source 1..20: mol_type = other RNA
cacgaattacagccaaaagg

SEQ ID NO: 8805 - RNA, 20 nt, synthetic construct
  source 1..20: mol_type = other RNA
cacgcagaaggcaggcgttt

SEQ ID NO: 8806 - RNA, 20 nt, synthetic construct
  source 1..20: mol_type = other RNA
cacgcccaaccccctcatgt

SEQ ID NO: 8807 - RNA, 20 nt, synthetic construct
  source 1..20: mol_type = other RNA
cacgcgacgtttgtagaatg

SEQ ID NO: 8808 - RNA, 20 nt, synthetic construct
  source 1..20: mol_type = other RNA
cacgcgttcacaaacctcag

SEQ ID NO: 8809 - RNA, 20 nt, synthetic construct
  source 1..20: mol_type = other RNA
cacgctggagtgcactggcg

SEQ ID NO: 8810 - RNA, 20 nt, synthetic construct
  source 1..20: mol_type = other RNA
cacggagcgagagagcacag

SEQ ID NO: 8811 - RNA, 20 nt, synthetic construct
  source 1..20: mol_type = other RNA
cacggcgggccaccaaggag

SEQ ID NO: 8812 - RNA, 20 nt, synthetic construct
  source 1..20: mol_type = other RNA
cacggtgtggccccacatag

SEQ ID NO: 8813 - RNA, 20 nt, synthetic construct
  source 1..20: mol_type = other RNA
cactccagctgcgctggggg

SEQ ID NO: 8814 - RNA, 20 nt, synthetic construct
  source 1..20: mol_type = other RNA
cactcccaggccaccccgcc

SEQ ID NO: 8815 - RNA, 20 nt, synthetic construct
  source 1..20: mol_type = other RNA
cactggcgccatgatagctc

SEQ ID NO: 8816 - RNA, 20 nt, synthetic construct
  source 1..20: mol_type = other RNA
cacttagggaggccgaggcg

SEQ ID NO: 8817 - RNA, 20 nt, synthetic construct
  source 1..20: mol_type = other RNA
cagaaagatgtcaataacgg

SEQ ID NO: 8818 - RNA, 20 nt, synthetic construct
  source 1..20: mol_type = other RNA
cagaagataaccatagtagt

SEQ ID NO: 8819 - RNA, 20 nt, synthetic construct
  source 1..20: mol_type = other RNA
cagaaggcaggcgtttttct

SEQ ID NO: 8820 - RNA, 20 nt, synthetic construct
  source 1..20: mol_type = other RNA
cagacaggcttacccgggcg

SEQ ID NO: 8821 - RNA, 20 nt, synthetic construct
  source 1..20: mol_type = other RNA
cagaccccaagcgcccctcc

SEQ ID NO: 8822 - RNA, 20 nt, synthetic construct
  source 1..20: mol_type = other RNA
cagagcaaactgggcggcat

SEQ ID NO: 8823 - RNA, 20 nt, synthetic construct
  source 1..20: mol_type = other RNA
cagagccgcagcagacaggc

SEQ ID NO: 8824 - RNA, 20 nt, synthetic construct
  source 1..20: mol_type = other RNA
cagagcgccgaggttggggg

SEQ ID NO: 8825 - RNA, 20 nt, synthetic construct
  source 1..20: mol_type = other RNA
cagagcgggagaggaaggac

SEQ ID NO: 8826 - RNA, 20 nt, synthetic construct
  source 1..20: mol_type = other RNA
cagaggccccgcgaaagagc

SEQ ID NO: 8827 - RNA, 20 nt, synthetic construct
  source 1..20: mol_type = other RNA
cagagggcttcctctttggc

SEQ ID NO: 8828 - RNA, 20 nt, synthetic construct
  source 1..20: mol_type = other RNA
cagagggtgcagagcgggag

SEQ ID NO: 8829 - RNA, 20 nt, synthetic construct
  source 1..20: mol_type = other RNA
cagaggtgctaggacatgcg

SEQ ID NO: 8830 - RNA, 20 nt, synthetic construct
  source 1..20: mol_type = other RNA
cagatgaagaaactaaggca

SEQ ID NO: 8831 - RNA, 20 nt, synthetic construct
  source 1..20: mol_type = other RNA
cagcaatcgagattgaagtc

SEQ ID NO: 8832 - RNA, 20 nt, synthetic construct
  source 1..20: mol_type = other RNA
cagcacgcgacgtttgtaga

SEQ ID NO: 8833 - RNA, 20 nt, synthetic construct
  source 1..20: mol_type = other RNA
cagcagacaggcttacccgg

SEQ ID NO: 8834 - RNA, 20 nt, synthetic construct
  source 1..20: mol_type = other RNA
cagccaaaaggcatgcgctc

SEQ ID NO: 8835 - RNA, 20 nt, synthetic construct
  source 1..20: mol_type = other RNA
cagccaagcattctacaaac

SEQ ID NO: 8836 - RNA, 20 nt, synthetic construct
  source 1..20: mol_type = other RNA
cagccaccggagcagctggg

SEQ ID NO: 8837 - RNA, 20 nt, synthetic construct
  source 1..20: mol_type = other RNA
cagccctggactagccccac

SEQ ID NO: 8838 - RNA, 20 nt, synthetic construct
  source 1..20: mol_type = other RNA
cagcgagggccacagagggt

SEQ ID NO: 8839 - RNA, 20 nt, synthetic construct
  source 1..20: mol_type = other RNA
cagcgcagctggagtggggg

SEQ ID NO: 8840 - RNA, 20 nt, synthetic construct
  source 1..20: mol_type = other RNA
cagcgccgcgcctttgggac

SEQ ID NO: 8841 - RNA, 20 nt, synthetic construct
  source 1..20: mol_type = other RNA
cagctctccagtctaaggga

SEQ ID NO: 8842 - RNA, 20 nt, synthetic construct
  source 1..20: mol_type = other RNA
cagctgcgctgggggagcca

SEQ ID NO: 8843 - RNA, 20 nt, synthetic construct
  source 1..20: mol_type = other RNA
cagctgctccggtggctgag

SEQ ID NO: 8844 - RNA, 20 nt, synthetic construct
  source 1..20: mol_type = other RNA
cagctggagtgggggacggg

SEQ ID NO: 8845 - RNA, 20 nt, synthetic construct
  source 1..20: mol_type = other RNA
cagctgggaccacaggcacg

SEQ ID NO: 8846 - RNA, 20 nt, synthetic construct
  source 1..20: mol_type = other RNA
caggcaaagagccaaagagg

SEQ ID NO: 8847 - RNA, 20 nt, synthetic construct
  source 1..20: mol_type = other RNA
caggccaccccgccgcttcc

SEQ ID NO: 8848 - RNA, 20 nt, synthetic construct
  source 1..20: mol_type = other RNA
caggcgtaagctaccacgcc

SEQ ID NO: 8849 - RNA, 20 nt, synthetic construct
  source 1..20: mol_type = other RNA
caggcgtttttcttaaaaaa

SEQ ID NO: 8850 - RNA, 20 nt, synthetic construct
  source 1..20: mol_type = other RNA
caggctggtctcaactacgg

SEQ ID NO: 8851 - RNA, 20 nt, synthetic construct
  source 1..20: mol_type = other RNA
caggcttacccgggcgacgc

SEQ ID NO: 8852 - RNA, 20 nt, synthetic construct
  source 1..20: mol_type = other RNA
cagggcccatgccgcccagt

SEQ ID NO: 8853 - RNA, 20 nt, synthetic construct
  source 1..20: mol_type = other RNA
cagggctggatctcggggaa

SEQ ID NO: 8854 - RNA, 20 nt, synthetic construct
  source 1..20: mol_type = other RNA
cagggcttttgcgggagcgc

SEQ ID NO: 8855 - RNA, 20 nt, synthetic construct
  source 1..20: mol_type = other RNA
caggggagacctttggccta

SEQ ID NO: 8856 - RNA, 20 nt, synthetic construct
  source 1..20: mol_type = other RNA
caggggataaatggcagcaa

SEQ ID NO: 8857 - RNA, 20 nt, synthetic construct
  source 1..20: mol_type = other RNA
cagtacatcttggaaacaac

SEQ ID NO: 8858 - RNA, 20 nt, synthetic construct
  source 1..20: mol_type = other RNA
cagtctaagggaagcagagc

SEQ ID NO: 8859 - RNA, 20 nt, synthetic construct
  source 1..20: mol_type = other RNA
cagtgcactccagcgtgggc

SEQ ID NO: 8860 - RNA, 20 nt, synthetic construct
  source 1..20: mol_type = other RNA
cagttatcttccgccataga

SEQ ID NO: 8861 - RNA, 20 nt, synthetic construct
  source 1..20: mol_type = other RNA
cagtttgctctggagaatct

SEQ ID NO: 8862 - RNA, 20 nt, synthetic construct
  source 1..20: mol_type = other RNA
cataaagtccttggcacaca

SEQ ID NO: 8863 - RNA, 20 nt, synthetic construct
  source 1..20: mol_type = other RNA
catagacccagaggtgctag

SEQ ID NO: 8864 - RNA, 20 nt, synthetic construct
  source 1..20: mol_type = other RNA
catagataactactatggtt

SEQ ID NO: 8865 - RNA, 20 nt, synthetic construct
  source 1..20: mol_type = other RNA
catagtagttatctatggcg

SEQ ID NO: 8866 - RNA, 20 nt, synthetic construct
  source 1..20: mol_type = other RNA
catcacatgtcacttttaaa

SEQ ID NO: 8867 - RNA, 20 nt, synthetic construct
  source 1..20: mol_type = other RNA
catcctcccgcctcggcctc

SEQ ID NO: 8868 - RNA, 20 nt, synthetic construct
  source 1..20: mol_type = other RNA
catctgtgagaggcagaaga

SEQ ID NO: 8869 - RNA, 20 nt, synthetic construct
  source 1..20: mol_type = other RNA
catcttggaaacaaccaggc

SEQ ID NO: 8870 - RNA, 20 nt, synthetic construct
  source 1..20: mol_type = other RNA
catctttctgtgtgccaagg

SEQ ID NO: 8871 - RNA, 20 nt, synthetic construct
  source 1..20: mol_type = other RNA
catgagggggttgggcgtgg

SEQ ID NO: 8872 - RNA, 20 nt, synthetic construct
  source 1..20: mol_type = other RNA
catgatagctcaaaagccta

SEQ ID NO: 8873 - RNA, 20 nt, synthetic construct
  source 1..20: mol_type = other RNA
catgccgcccagtttgctct

SEQ ID NO: 8874 - RNA, 20 nt, synthetic construct
  source 1..20: mol_type = other RNA
catgccttttggctgtaatt

SEQ ID NO: 8875 - RNA, 20 nt, synthetic construct
  source 1..20: mol_type = other RNA
catgcgaacttagcgggcgc

SEQ ID NO: 8876 - RNA, 20 nt, synthetic construct
  source 1..20: mol_type = other RNA
catgcgctcccgcaaaagcc

SEQ ID NO: 8877 - RNA, 20 nt, synthetic construct
  source 1..20: mol_type = other RNA
catggcgccagtgcactcca

SEQ ID NO: 8878 - RNA, 20 nt, synthetic construct
  source 1..20: mol_type = other RNA
catgggccctgtggtctttt

SEQ ID NO: 8879 - RNA, 20 nt, synthetic construct
  source 1..20: mol_type = other RNA
catggtgaagcctggtctct

SEQ ID NO: 8880 - RNA, 20 nt, synthetic construct
  source 1..20: mol_type = other RNA
catgtcctagcacctctggg

SEQ ID NO: 8881 - RNA, 20 nt, synthetic construct
  source 1..20: mol_type = other RNA
catgtgatgggaacaaataa

SEQ ID NO: 8882 - RNA, 20 nt, synthetic construct
  source 1..20: mol_type = other RNA
catgttggccaggctggtct

SEQ ID NO: 8883 - RNA, 20 nt, synthetic construct
  source 1..20: mol_type = other RNA
catgttttcaaaaccgaaag

SEQ ID NO: 8884 - RNA, 20 nt, synthetic construct
  source 1..20: mol_type = other RNA
cattctacaaacgtcgcgtg

SEQ ID NO: 8885 - RNA, 20 nt, synthetic construct
  source 1..20: mol_type = other RNA
catttatcccctgtgtaatt

SEQ ID NO: 8886 - RNA, 20 nt, synthetic construct
  source 1..20: mol_type = other RNA
ccaaaaggcatgcgctcccg

SEQ ID NO: 8887 - RNA, 20 nt, synthetic construct
  source 1..20: mol_type = other RNA
ccaaagaggaagccctctgt

SEQ ID NO: 8888 - RNA, 20 nt, synthetic construct
  source 1..20: mol_type = other RNA
ccaaaggcgcggcgctgagg

SEQ ID NO: 8889 - RNA, 20 nt, synthetic construct
  source 1..20: mol_type = other RNA
ccaaaggtctcccctgctcc

SEQ ID NO: 8890 - RNA, 20 nt, synthetic construct
  source 1..20: mol_type = other RNA
ccaacatggtgaagcctggt

SEQ ID NO: 8891 - RNA, 20 nt, synthetic construct
  source 1..20: mol_type = other RNA
ccaaccccctcatgttttca

SEQ ID NO: 8892 - RNA, 20 nt, synthetic construct
  source 1..20: mol_type = other RNA
ccaacctcggcgctctgacg

SEQ ID NO: 8893 - RNA, 20 nt, synthetic construct
  source 1..20: mol_type = other RNA
ccaagatgtactgtgcctct

SEQ ID NO: 8894 - RNA, 20 nt, synthetic construct
  source 1..20: mol_type = other RNA
ccaagcattctacaaacgtc

SEQ ID NO: 8895 - RNA, 20 nt, synthetic construct
  source 1..20: mol_type = other RNA
ccaagcgcccctccacgcgt

SEQ ID NO: 8896 - RNA, 20 nt, synthetic construct
  source 1..20: mol_type = other RNA
ccaaggactttatgtgcttt

SEQ ID NO: 8897 - RNA, 20 nt, synthetic construct
  source 1..20: mol_type = other RNA
ccaaggagaacttggagaag

SEQ ID NO: 8898 - RNA, 20 nt, synthetic construct
  source 1..20: mol_type = other RNA
ccaagttctccttggtggcc

SEQ ID NO: 8899 - RNA, 20 nt, synthetic construct
  source 1..20: mol_type = other RNA
ccacacccggctaatttttg

SEQ ID NO: 8900 - RNA, 20 nt, synthetic construct
  source 1..20: mol_type = other RNA
ccacaccgtggggaggaaac

SEQ ID NO: 8901 - RNA, 20 nt, synthetic construct
  source 1..20: mol_type = other RNA
ccacagagggtgcagagcgg

SEQ ID NO: 8902 - RNA, 20 nt, synthetic construct
  source 1..20: mol_type = other RNA
ccacagctctccagtctaag

SEQ ID NO: 8903 - RNA, 20 nt, synthetic construct
  source 1..20: mol_type = other RNA
ccacaggcacgagccaccac

SEQ ID NO: 8904 - RNA, 20 nt, synthetic construct
  source 1..20: mol_type = other RNA
ccacagggcccatgccgccc

SEQ ID NO: 8905 - RNA, 20 nt, synthetic construct
  source 1..20: mol_type = other RNA
ccacatagacccagaggtgc

SEQ ID NO: 8906 - RNA, 20 nt, synthetic construct
  source 1..20: mol_type = other RNA
ccaccaaggagaacttggag

SEQ ID NO: 8907 - RNA, 20 nt, synthetic construct
  source 1..20: mol_type = other RNA
ccaccccgccgcttccccga

SEQ ID NO: 8908 - RNA, 20 nt, synthetic construct
  source 1..20: mol_type = other RNA
ccaccggagcagctgggacc

SEQ ID NO: 8909 - RNA, 20 nt, synthetic construct
  source 1..20: mol_type = other RNA
ccacgcccaaccccctcatg

SEQ ID NO: 8910 - RNA, 20 nt, synthetic construct
  source 1..20: mol_type = other RNA
ccacgcgttcacaaacctca

SEQ ID NO: 8911 - RNA, 20 nt, synthetic construct
  source 1..20: mol_type = other RNA
ccacgctggagtgcactggc

SEQ ID NO: 8912 - RNA, 20 nt, synthetic construct
  source 1..20: mol_type = other RNA
ccacggcgggccaccaagga

SEQ ID NO: 8913 - RNA, 20 nt, synthetic construct
  source 1..20: mol_type = other RNA
ccacggtgtggccccacata

SEQ ID NO: 8914 - RNA, 20 nt, synthetic construct
  source 1..20: mol_type = other RNA
ccactccagctgcgctgggg

SEQ ID NO: 8915 - RNA, 20 nt, synthetic construct
  source 1..20: mol_type = other RNA
ccactcccaggccaccccgc

SEQ ID NO: 8916 - RNA, 20 nt, synthetic construct
  source 1..20: mol_type = other RNA
ccagaccccaagcgcccctc

SEQ ID NO: 8917 - RNA, 20 nt, synthetic construct
  source 1..20: mol_type = other RNA
ccagagcaaactgggcggca

SEQ ID NO: 8918 - RNA, 20 nt, synthetic construct
  source 1..20: mol_type = other RNA
ccagagcgggagggtaggag

SEQ ID NO: 8919 - RNA, 20 nt, synthetic construct
  source 1..20: mol_type = other RNA
ccagaggccccgcgaaagag

SEQ ID NO: 8920 - RNA, 20 nt, synthetic construct
  source 1..20: mol_type = other RNA
ccagaggtgctaggacatgc

SEQ ID NO: 8921 - RNA, 20 nt, synthetic construct
  source 1..20: mol_type = other RNA
ccagccctggactagcccca

SEQ ID NO: 8922 - RNA, 20 nt, synthetic construct
  source 1..20: mol_type = other RNA
ccagcgcagctggagtgggg

SEQ ID NO: 8923 - RNA, 20 nt, synthetic construct
  source 1..20: mol_type = other RNA
ccagctgcgctgggggagcc

SEQ ID NO: 8924 - RNA, 20 nt, synthetic construct
  source 1..20: mol_type = other RNA
ccagctgctccggtggctga

SEQ ID NO: 8925 - RNA, 20 nt, synthetic construct
  source 1..20: mol_type = other RNA
ccaggcaaagagccaaagag

SEQ ID NO: 8926 - RNA, 20 nt, synthetic construct
  source 1..20: mol_type = other RNA
ccaggccaccccgccgcttc

SEQ ID NO: 8927 - RNA, 20 nt, synthetic construct
  source 1..20: mol_type = other RNA
ccaggctggtctcaactacg

SEQ ID NO: 8928 - RNA, 20 nt, synthetic construct
  source 1..20: mol_type = other RNA
ccagggctggatctcgggga

SEQ ID NO: 8929 - RNA, 20 nt, synthetic construct
  source 1..20: mol_type = other RNA
ccagggcttttgcgggagcg

SEQ ID NO: 8930 - RNA, 20 nt, synthetic construct
  source 1..20: mol_type = other RNA
ccagtctaagggaagcagag

SEQ ID NO: 8931 - RNA, 20 nt, synthetic construct
  source 1..20: mol_type = other RNA
ccagtttgctctggagaatc

SEQ ID NO: 8932 - RNA, 20 nt, synthetic construct
  source 1..20: mol_type = other RNA
ccatagataactactatggt

SEQ ID NO: 8933 - RNA, 20 nt, synthetic construct
  source 1..20: mol_type = other RNA
ccatagtagttatctatggc

SEQ ID NO: 8934 - RNA, 20 nt, synthetic construct
  source 1..20: mol_type = other RNA
ccatcacatgtcacttttaa

SEQ ID NO: 8935 - RNA, 20 nt, synthetic construct
  source 1..20: mol_type = other RNA
ccatcctcccgcctcggcct

SEQ ID NO: 8936 - RNA, 20 nt, synthetic construct
  source 1..20: mol_type = other RNA
ccatgatagctcaaaagcct

SEQ ID NO: 8937 - RNA, 20 nt, synthetic construct
  source 1..20: mol_type = other RNA
ccatgccgcccagtttgctc

SEQ ID NO: 8938 - RNA, 20 nt, synthetic construct
  source 1..20: mol_type = other RNA
ccatttatcccctgtgtaat

SEQ ID NO: 8939 - RNA, 20 nt, synthetic construct
  source 1..20: mol_type = other RNA
cccaaaggcgcggcgctgag

SEQ ID NO: 8940 - RNA, 20 nt, synthetic construct
  source 1..20: mol_type = other RNA
cccaaccccctcatgttttc

SEQ ID NO: 8941 - RNA, 20 nt, synthetic construct
  source 1..20: mol_type = other RNA
cccaacctcggcgctctgac

SEQ ID NO: 8942 - RNA, 20 nt, synthetic construct
  source 1..20: mol_type = other RNA
cccaagcgcccctccacgcg

SEQ ID NO: 8943 - RNA, 20 nt, synthetic construct
  source 1..20: mol_type = other RNA
cccacatagacccagaggtg

SEQ ID NO: 8944 - RNA, 20 nt, synthetic construct
  source 1..20: mol_type = other RNA
cccacgctggagtgcactgg

SEQ ID NO: 8945 - RNA, 20 nt, synthetic construct
  source 1..20: mol_type = other RNA
cccacggcgggccaccaagg

SEQ ID NO: 8946 - RNA, 20 nt, synthetic construct
  source 1..20: mol_type = other RNA
cccacggtgtggccccacat

SEQ ID NO: 8947 - RNA, 20 nt, synthetic construct
  source 1..20: mol_type = other RNA
cccactccagctgcgctggg

SEQ ID NO: 8948 - RNA, 20 nt, synthetic construct
  source 1..20: mol_type = other RNA
cccactcccaggccaccccg

SEQ ID NO: 8949 - RNA, 20 nt, synthetic construct
  source 1..20: mol_type = other RNA
cccagaccccaagcgcccct

SEQ ID NO: 8950 - RNA, 20 nt, synthetic construct
  source 1..20: mol_type = other RNA
cccagaggtgctaggacatg

SEQ ID NO: 8951 - RNA, 20 nt, synthetic construct
  source 1..20: mol_type = other RNA
cccagcgcagctggagtggg

SEQ ID NO: 8952 - RNA, 20 nt, synthetic construct
  source 1..20: mol_type = other RNA
cccagctgctccggtggctg

SEQ ID NO: 8953 - RNA, 20 nt, synthetic construct
  source 1..20: mol_type = other RNA
cccaggccaccccgccgctt

SEQ ID NO: 8954 - RNA, 20 nt, synthetic construct
  source 1..20: mol_type = other RNA
cccagtttgctctggagaat

SEQ ID NO: 8955 - RNA, 20 nt, synthetic construct
  source 1..20: mol_type = other RNA
cccatcacatgtcactttta

SEQ ID NO: 8956 - RNA, 20 nt, synthetic construct
  source 1..20: mol_type = other RNA
cccatgccgcccagtttgct

SEQ ID NO: 8957 - RNA, 20 nt, synthetic construct
  source 1..20: mol_type = other RNA
ccccaacctcggcgctctga

SEQ ID NO: 8958 - RNA, 20 nt, synthetic construct
  source 1..20: mol_type = other RNA
ccccaagcgcccctccacgc

SEQ ID NO: 8959 - RNA, 20 nt, synthetic construct
  source 1..20: mol_type = other RNA
ccccacatagacccagaggt

SEQ ID NO: 8960 - RNA, 20 nt, synthetic construct
  source 1..20: mol_type = other RNA
ccccacggcgggccaccaag

SEQ ID NO: 8961 - RNA, 20 nt, synthetic construct
  source 1..20: mol_type = other RNA
ccccacggtgtggccccaca

SEQ ID NO: 8962 - RNA, 20 nt, synthetic construct
  source 1..20: mol_type = other RNA
ccccactccagctgcgctgg

SEQ ID NO: 8963 - RNA, 20 nt, synthetic construct
  source 1..20: mol_type = other RNA
ccccactcccaggccacccc

SEQ ID NO: 8964 - RNA, 20 nt, synthetic construct
  source 1..20: mol_type = other RNA
ccccagaccccaagcgcccc

SEQ ID NO: 8965 - RNA, 20 nt, synthetic construct
  source 1..20: mol_type = other RNA
ccccagcgcagctggagtgg

SEQ ID NO: 8966 - RNA, 20 nt, synthetic construct
  source 1..20: mol_type = other RNA
cccccaacctcggcgctctg

SEQ ID NO: 8967 - RNA, 20 nt, synthetic construct
  source 1..20: mol_type = other RNA
cccccactccagctgcgctg

SEQ ID NO: 8968 - RNA, 20 nt, synthetic construct
  source 1..20: mol_type = other RNA
cccccagaccccaagcgccc

SEQ ID NO: 8969 - RNA, 20 nt, synthetic construct
  source 1..20: mol_type = other RNA
cccccagcgcagctggagtg

SEQ ID NO: 8970 - RNA, 20 nt, synthetic construct
  source 1..20: mol_type = other RNA
ccccctcatgttttcaaaac

SEQ ID NO: 8971 - RNA, 20 nt, synthetic construct
  source 1..20: mol_type = other RNA
cccccttccccactcccagg

SEQ ID NO: 8972 - RNA, 20 nt, synthetic construct
  source 1..20: mol_type = other RNA
ccccgagatccagccctgga

SEQ ID NO: 8973 - RNA, 20 nt, synthetic construct
  source 1..20: mol_type = other RNA
ccccgccgaaaggggcaagt

SEQ ID NO: 8974 - RNA, 20 nt, synthetic construct
  source 1..20: mol_type = other RNA
ccccgccgcttccccgagat

SEQ ID NO: 8975 - RNA, 20 nt, synthetic construct
  source 1..20: mol_type = other RNA
ccccgcgaaagagcggaaga

SEQ ID NO: 8976 - RNA, 20 nt, synthetic construct
  source 1..20: mol_type = other RNA
cccctcatgttttcaaaacc

SEQ ID NO: 8977 - RNA, 20 nt, synthetic construct
  source 1..20: mol_type = other RNA
cccctccacgcgttcacaaa

SEQ ID NO: 8978 - RNA, 20 nt, synthetic construct
  source 1..20: mol_type = other RNA
cccctgctccccgccgaaag

SEQ ID NO: 8979 - RNA, 20 nt, synthetic construct
  source 1..20: mol_type = other RNA
cccctgtgtaattaagtttc

SEQ ID NO: 8980 - RNA, 20 nt, synthetic construct
  source 1..20: mol_type = other RNA
ccccttccccactcccaggc

SEQ ID NO: 8981 - RNA, 20 nt, synthetic construct
  source 1..20: mol_type = other RNA
cccctttcggcggggagcag

SEQ ID NO: 8982 - RNA, 20 nt, synthetic construct
  source 1..20: mol_type = other RNA
cccgaccctcccgtcgccgt

SEQ ID NO: 8983 - RNA, 20 nt, synthetic construct
  source 1..20: mol_type = other RNA
cccgagatccagccctggac

SEQ ID NO: 8984 - RNA, 20 nt, synthetic construct
  source 1..20: mol_type = other RNA
cccgcaaaagccctggttag

SEQ ID NO: 8985 - RNA, 20 nt, synthetic construct
  source 1..20: mol_type = other RNA
cccgccgaaaggggcaagta

SEQ ID NO: 8986 - RNA, 20 nt, synthetic construct
  source 1..20: mol_type = other RNA
cccgccgcttccccgagatc

SEQ ID NO: 8987 - RNA, 20 nt, synthetic construct
  source 1..20: mol_type = other RNA
cccgccgtggggctagtcca

SEQ ID NO: 8988 - RNA, 20 nt, synthetic construct
  source 1..20: mol_type = other RNA
cccgcctcagccaccggagc

SEQ ID NO: 8989 - RNA, 20 nt, synthetic construct
  source 1..20: mol_type = other RNA
cccgcgaaagagcggaagag

SEQ ID NO: 8990 - RNA, 20 nt, synthetic construct
  source 1..20: mol_type = other RNA
cccgctaagttcgcatgtcc

SEQ ID NO: 8991 - RNA, 20 nt, synthetic construct
  source 1..20: mol_type = other RNA
cccgctctgcaccctctgtg

SEQ ID NO: 8992 - RNA, 20 nt, synthetic construct
  source 1..20: mol_type = other RNA
cccgctctggtccttcctct

SEQ ID NO: 8993 - RNA, 20 nt, synthetic construct
  source 1..20: mol_type = other RNA
cccggctaatttttgttatt

SEQ ID NO: 8994 - RNA, 20 nt, synthetic construct
  source 1..20: mol_type = other RNA
cccgggacgcgcgctacttg

SEQ ID NO: 8995 - RNA, 20 nt, synthetic construct
  source 1..20: mol_type = other RNA
cccgggtaagcctgtctgct

SEQ ID NO: 8996 - RNA, 20 nt, synthetic construct
  source 1..20: mol_type = other RNA
cccgggtgcgcacccccttc

SEQ ID NO: 8997 - RNA, 20 nt, synthetic construct
  source 1..20: mol_type = other RNA
cccgtcccccactccagctg

SEQ ID NO: 8998 - RNA, 20 nt, synthetic construct
  source 1..20: mol_type = other RNA
cccgtcgccgtaggccaaag

SEQ ID NO: 8999 - RNA, 20 nt, synthetic construct
  source 1..20: mol_type = other RNA
cccgttattgacatctttct

SEQ ID NO: 9000 - RNA, 20 nt, synthetic construct
  source 1..20: mol_type = other RNA
ccctaaactttgtcccgacc

SEQ ID NO: 9001 - RNA, 20 nt, synthetic construct
  source 1..20: mol_type = other RNA
ccctcatgttttcaaaaccg

SEQ ID NO: 9002 - RNA, 20 nt, synthetic construct
  source 1..20: mol_type = other RNA
ccctccacgcgttcacaaac

SEQ ID NO: 9003 - RNA, 20 nt, synthetic construct
  source 1..20: mol_type = other RNA
ccctcccccaacctcggcgc

SEQ ID NO: 9004 - RNA, 20 nt, synthetic construct
  source 1..20: mol_type = other RNA
ccctcccgctctggtccttc

SEQ ID NO: 9005 - RNA, 20 nt, synthetic construct
  source 1..20: mol_type = other RNA
ccctcccgtcgccgtaggcc

SEQ ID NO: 9006 - RNA, 20 nt, synthetic construct
  source 1..20: mol_type = other RNA
ccctcgctgtgctctctcgc

SEQ ID NO: 9007 - RNA, 20 nt, synthetic construct
  source 1..20: mol_type = other RNA
ccctctgtacgaaaagacca

SEQ ID NO: 9008 - RNA, 20 nt, synthetic construct
  source 1..20: mol_type = other RNA
ccctctgtggccctcgctgt

SEQ ID NO: 9009 - RNA, 20 nt, synthetic construct
  source 1..20: mol_type = other RNA
ccctgctccccgccgaaagg

SEQ ID NO: 9010 - RNA, 20 nt, synthetic construct
  source 1..20: mol_type = other RNA
ccctggactagccccacggc

SEQ ID NO: 9011 - RNA, 20 nt, synthetic construct
  source 1..20: mol_type = other RNA
ccctggttaggcttgacttc

SEQ ID NO: 9012 - RNA, 20 nt, synthetic construct
  source 1..20: mol_type = other RNA
ccctgtggtcttttcgtaca

SEQ ID NO: 9013 - RNA, 20 nt, synthetic construct
  source 1..20: mol_type = other RNA
ccctgtgtaattaagtttct

SEQ ID NO: 9014 - RNA, 20 nt, synthetic construct
  source 1..20: mol_type = other RNA
cccttagactggagagctgt

SEQ ID NO: 9015 - RNA, 20 nt, synthetic construct
  source 1..20: mol_type = other RNA
cccttccccactcccaggcc

SEQ ID NO: 9016 - RNA, 20 nt, synthetic construct
  source 1..20: mol_type = other RNA
cccttctccaagttctcctt

SEQ ID NO: 9017 - RNA, 20 nt, synthetic construct
  source 1..20: mol_type = other RNA
ccctttcggcggggagcagg

SEQ ID NO: 9018 - RNA, 20 nt, synthetic construct
  source 1..20: mol_type = other RNA
ccgaaaggggcaagtagcgc

SEQ ID NO: 9019 - RNA, 20 nt, synthetic construct
  source 1..20: mol_type = other RNA
ccgaaagtaagaggcacagt

SEQ ID NO: 9020 - RNA, 20 nt, synthetic construct
  source 1..20: mol_type = other RNA
ccgaccctcccgtcgccgta

SEQ ID NO: 9021 - RNA, 20 nt, synthetic construct
  source 1..20: mol_type = other RNA
ccgagatccagccctggact

SEQ ID NO: 9022 - RNA, 20 nt, synthetic construct
  source 1..20: mol_type = other RNA
ccgagattttaagaaactta

SEQ ID NO: 9023 - RNA, 20 nt, synthetic construct
  source 1..20: mol_type = other RNA
ccgaggcgggaggatggctt

SEQ ID NO: 9024 - RNA, 20 nt, synthetic construct
  source 1..20: mol_type = other RNA
ccgaggttgggggagggttt

SEQ ID NO: 9025 - RNA, 20 nt, synthetic construct
  source 1..20: mol_type = other RNA
ccgcaaaagccctggttagg

SEQ ID NO: 9026 - RNA, 20 nt, synthetic construct
  source 1..20: mol_type = other RNA
ccgcagcagacaggcttacc

SEQ ID NO: 9027 - RNA, 20 nt, synthetic construct
  source 1..20: mol_type = other RNA
ccgccatagataactactat

SEQ ID NO: 9028 - RNA, 20 nt, synthetic construct
  source 1..20: mol_type = other RNA
ccgcccagtttgctctggag

SEQ ID NO: 9029 - RNA, 20 nt, synthetic construct
  source 1..20: mol_type = other RNA
ccgccgaaaggggcaagtag

SEQ ID NO: 9030 - RNA, 20 nt, synthetic construct
  source 1..20: mol_type = other RNA
ccgccgcttccccgagatcc

SEQ ID NO: 9031 - RNA, 20 nt, synthetic construct
  source 1..20: mol_type = other RNA
ccgccgtggggctagtccag

SEQ ID NO: 9032 - RNA, 20 nt, synthetic construct
  source 1..20: mol_type = other RNA
ccgcctcagccaccggagca

SEQ ID NO: 9033 - RNA, 20 nt, synthetic construct
  source 1..20: mol_type = other RNA
ccgcgaaagagcggaagaga

SEQ ID NO: 9034 - RNA, 20 nt, synthetic construct
  source 1..20: mol_type = other RNA
ccgcgcctttgggacgagcc

SEQ ID NO: 9035 - RNA, 20 nt, synthetic construct
  source 1..20: mol_type = other RNA
ccgctaagttcgcatgtcct

SEQ ID NO: 9036 - RNA, 20 nt, synthetic construct
  source 1..20: mol_type = other RNA
ccgctctgcaccctctgtgg

SEQ ID NO: 9037 - RNA, 20 nt, synthetic construct
  source 1..20: mol_type = other RNA
ccgctctggtccttcctctc

SEQ ID NO: 9038 - RNA, 20 nt, synthetic construct
  source 1..20: mol_type = other RNA
ccgctctttcgcggggcctc

SEQ ID NO: 9039 - RNA, 20 nt, synthetic construct
  source 1..20: mol_type = other RNA
ccgcttccccgagatccagc

SEQ ID NO: 9040 - RNA, 20 nt, synthetic construct
  source 1..20: mol_type = other RNA
ccgctttgtatcacagccaa

SEQ ID NO: 9041 - RNA, 20 nt, synthetic construct
  source 1..20: mol_type = other RNA
ccggagcagctgggaccaca

SEQ ID NO: 9042 - RNA, 20 nt, synthetic construct
  source 1..20: mol_type = other RNA
ccggctaatttttgttatta

SEQ ID NO: 9043 - RNA, 20 nt, synthetic construct
  source 1..20: mol_type = other RNA
ccgggacgcgcgctacttgc

SEQ ID NO: 9044 - RNA, 20 nt, synthetic construct
  source 1..20: mol_type = other RNA
ccgggtaagcctgtctgctg

SEQ ID NO: 9045 - RNA, 20 nt, synthetic construct
  source 1..20: mol_type = other RNA
ccgggtgcgcacccccttcc

SEQ ID NO: 9046 - RNA, 20 nt, synthetic construct
  source 1..20: mol_type = other RNA
ccgggtgtggtggctcgtgc

SEQ ID NO: 9047 - RNA, 20 nt, synthetic construct
  source 1..20: mol_type = other RNA
ccggtggctgaggcgggagg

SEQ ID NO: 9048 - RNA, 20 nt, synthetic construct
  source 1..20: mol_type = other RNA
ccgtaggccaaaggtctccc

SEQ ID NO: 9049 - RNA, 20 nt, synthetic construct
  source 1..20: mol_type = other RNA
ccgtagttgagaccagcctg

SEQ ID NO: 9050 - RNA, 20 nt, synthetic construct
  source 1..20: mol_type = other RNA
ccgtcccccactccagctgc

SEQ ID NO: 9051 - RNA, 20 nt, synthetic construct
  source 1..20: mol_type = other RNA
ccgtcgccgtaggccaaagg

SEQ ID NO: 9052 - RNA, 20 nt, synthetic construct
  source 1..20: mol_type = other RNA
ccgtgacttcccttctccaa

SEQ ID NO: 9053 - RNA, 20 nt, synthetic construct
  source 1..20: mol_type = other RNA
ccgtggggaggaaacagcac

SEQ ID NO: 9054 - RNA, 20 nt, synthetic construct
  source 1..20: mol_type = other RNA
ccgtggggctagtccagggc

SEQ ID NO: 9055 - RNA, 20 nt, synthetic construct
  source 1..20: mol_type = other RNA
ccgttattgacatctttctg

SEQ ID NO: 9056 - RNA, 20 nt, synthetic construct
  source 1..20: mol_type = other RNA
cctaaactttgtcccgaccc

SEQ ID NO: 9057 - RNA, 20 nt, synthetic construct
  source 1..20: mol_type = other RNA
cctaaccagggcttttgcgg

SEQ ID NO: 9058 - RNA, 20 nt, synthetic construct
  source 1..20: mol_type = other RNA
cctacccgtcccccactcca

SEQ ID NO: 9059 - RNA, 20 nt, synthetic construct
  source 1..20: mol_type = other RNA
cctaccctcccgctctggtc

SEQ ID NO: 9060 - RNA, 20 nt, synthetic construct
  source 1..20: mol_type = other RNA
cctacggcgacgggagggtc

SEQ ID NO: 9061 - RNA, 20 nt, synthetic construct
  source 1..20: mol_type = other RNA
cctagacgaagtccacagct

SEQ ID NO: 9062 - RNA, 20 nt, synthetic construct
  source 1..20: mol_type = other RNA
cctagcacctctgggtctat

SEQ ID NO: 9063 - RNA, 20 nt, synthetic construct
  source 1..20: mol_type = other RNA
cctcagccaccggagcagct

SEQ ID NO: 9064 - RNA, 20 nt, synthetic construct
  source 1..20: mol_type = other RNA
cctcagcgccgcgcctttgg

SEQ ID NO: 9065 - RNA, 20 nt, synthetic construct
  source 1..20: mol_type = other RNA
cctcatgttttcaaaaccga

SEQ ID NO: 9066 - RNA, 20 nt, synthetic construct
  source 1..20: mol_type = other RNA
cctccacgcgttcacaaacc

SEQ ID NO: 9067 - RNA, 20 nt, synthetic construct
  source 1..20: mol_type = other RNA
cctccccacggtgtggcccc

SEQ ID NO: 9068 - RNA, 20 nt, synthetic construct
  source 1..20: mol_type = other RNA
cctcccccaacctcggcgct

SEQ ID NO: 9069 - RNA, 20 nt, synthetic construct
  source 1..20: mol_type = other RNA
cctcccccagaccccaagcg

SEQ ID NO: 9070 - RNA, 20 nt, synthetic construct
  source 1..20: mol_type = other RNA
cctcccgcctcagccaccgg

SEQ ID NO: 9071 - RNA, 20 nt, synthetic construct
  source 1..20: mol_type = other RNA
cctcccgctctggtccttcc

SEQ ID NO: 9072 - RNA, 20 nt, synthetic construct
  source 1..20: mol_type = other RNA
cctcccgtcgccgtaggcca

SEQ ID NO: 9073 - RNA, 20 nt, synthetic construct
  source 1..20: mol_type = other RNA
cctcgctgtgctctctcgct

SEQ ID NO: 9074 - RNA, 20 nt, synthetic construct
  source 1..20: mol_type = other RNA
cctcggcgctctgacgctta

SEQ ID NO: 9075 - RNA, 20 nt, synthetic construct
  source 1..20: mol_type = other RNA
cctctcacagatgaagaaac

SEQ ID NO: 9076 - RNA, 20 nt, synthetic construct
  source 1..20: mol_type = other RNA
cctctcccgctctgcaccct

SEQ ID NO: 9077 - RNA, 20 nt, synthetic construct
  source 1..20: mol_type = other RNA
cctctggctcccccagcgca

SEQ ID NO: 9078 - RNA, 20 nt, synthetic construct
  source 1..20: mol_type = other RNA
cctctgggtctatgtggggc

SEQ ID NO: 9079 - RNA, 20 nt, synthetic construct
  source 1..20: mol_type = other RNA
cctctgtacgaaaagaccac

SEQ ID NO: 9080 - RNA, 20 nt, synthetic construct
  source 1..20: mol_type = other RNA
cctctgtggccctcgctgtg

SEQ ID NO: 9081 - RNA, 20 nt, synthetic construct
  source 1..20: mol_type = other RNA
cctcttactttcggttttga

SEQ ID NO: 9082 - RNA, 20 nt, synthetic construct
  source 1..20: mol_type = other RNA
cctctttggctctttgcctg

SEQ ID NO: 9083 - RNA, 20 nt, synthetic construct
  source 1..20: mol_type = other RNA
cctgccttctgcgtgagatt

SEQ ID NO: 9084 - RNA, 20 nt, synthetic construct
  source 1..20: mol_type = other RNA
cctgctccccgccgaaaggg

SEQ ID NO: 9085 - RNA, 20 nt, synthetic construct
  source 1..20: mol_type = other RNA
cctggactagccccacggcg

SEQ ID NO: 9086 - RNA, 20 nt, synthetic construct
  source 1..20: mol_type = other RNA
cctgggagtggggaaggggg

SEQ ID NO: 9087 - RNA, 20 nt, synthetic construct
  source 1..20: mol_type = other RNA
cctggtctctacaaaaaata

SEQ ID NO: 9088 - RNA, 20 nt, synthetic construct
  source 1..20: mol_type = other RNA
cctggttaggcttgacttca

SEQ ID NO: 9089 - RNA, 20 nt, synthetic construct
  source 1..20: mol_type = other RNA
cctggttgtttccaagatgt

SEQ ID NO: 9090 - RNA, 20 nt, synthetic construct
  source 1..20: mol_type = other RNA
cctgtctgctgcggctctgc

SEQ ID NO: 9091 - RNA, 20 nt, synthetic construct
  source 1..20: mol_type = other RNA
cctgtggtcccagctgctcc

SEQ ID NO: 9092 - RNA, 20 nt, synthetic construct
  source 1..20: mol_type = other RNA
cctgtggtcttttcgtacag

SEQ ID NO: 9093 - RNA, 20 nt, synthetic construct
  source 1..20: mol_type = other RNA
cctgtgtaattaagtttctt

SEQ ID NO: 9094 - RNA, 20 nt, synthetic construct
  source 1..20: mol_type = other RNA
ccttagactggagagctgtg

SEQ ID NO: 9095 - RNA, 20 nt, synthetic construct
  source 1..20: mol_type = other RNA
ccttagtttcttcatctgtg

SEQ ID NO: 9096 - RNA, 20 nt, synthetic construct
  source 1..20: mol_type = other RNA
ccttccccactcccaggcca

SEQ ID NO: 9097 - RNA, 20 nt, synthetic construct
  source 1..20: mol_type = other RNA
ccttcctctcccgctctgca

SEQ ID NO: 9098 - RNA, 20 nt, synthetic construct
  source 1..20: mol_type = other RNA
ccttctccaagttctccttg

SEQ ID NO: 9099 - RNA, 20 nt, synthetic construct
  source 1..20: mol_type = other RNA
ccttctgcgtgagattctcc

SEQ ID NO: 9100 - RNA, 20 nt, synthetic construct
  source 1..20: mol_type = other RNA
ccttggcacacagaaagatg

SEQ ID NO: 9101 - RNA, 20 nt, synthetic construct
  source 1..20: mol_type = other RNA
ccttggtggcccgccgtggg

SEQ ID NO: 9102 - RNA, 20 nt, synthetic construct
  source 1..20: mol_type = other RNA
cctttcggcggggagcaggg

SEQ ID NO: 9103 - RNA, 20 nt, synthetic construct
  source 1..20: mol_type = other RNA
cctttggcctacggcgacgg

SEQ ID NO: 9104 - RNA, 20 nt, synthetic construct
  source 1..20: mol_type = other RNA
cctttgggacgagcctaccc

SEQ ID NO: 9105 - RNA, 20 nt, synthetic construct
  source 1..20: mol_type = other RNA
ccttttggctgtaattcgtg

SEQ ID NO: 9106 - RNA, 20 nt, synthetic construct
  source 1..20: mol_type = other RNA
cgaaaagaccacagggccca

SEQ ID NO: 9107 - RNA, 20 nt, synthetic construct
  source 1..20: mol_type = other RNA
cgaaaccgctttgtatcaca

SEQ ID NO: 9108 - RNA, 20 nt, synthetic construct
  source 1..20: mol_type = other RNA
cgaaagagcggaagagaaac

SEQ ID NO: 9109 - RNA, 20 nt, synthetic construct
  source 1..20: mol_type = other RNA
cgaaaggggcaagtagcgcg

SEQ ID NO: 9110 - RNA, 20 nt, synthetic construct
  source 1..20: mol_type = other RNA
cgaaagtaagaggcacagta

SEQ ID NO: 9111 - RNA, 20 nt, synthetic construct
  source 1..20: mol_type = other RNA
cgaacttagcgggcgcctag

SEQ ID NO: 9112 - RNA, 20 nt, synthetic construct
  source 1..20: mol_type = other RNA
cgaagtccacagctctccag

SEQ ID NO: 9113 - RNA, 20 nt, synthetic construct
  source 1..20: mol_type = other RNA
cgaattacagccaaaaggca

SEQ ID NO: 9114 - RNA, 20 nt, synthetic construct
  source 1..20: mol_type = other RNA
cgaccctcccgtcgccgtag

SEQ ID NO: 9115 - RNA, 20 nt, synthetic construct
  source 1..20: mol_type = other RNA
cgacgccctaaactttgtcc

SEQ ID NO: 9116 - RNA, 20 nt, synthetic construct
  source 1..20: mol_type = other RNA
cgacgcctcccccagacccc

SEQ ID NO: 9117 - RNA, 20 nt, synthetic construct
  source 1..20: mol_type = other RNA
cgacgggagggtcgggacaa

SEQ ID NO: 9118 - RNA, 20 nt, synthetic construct
  source 1..20: mol_type = other RNA
cgacgtttgtagaatgcttg

SEQ ID NO: 9119 - RNA, 20 nt, synthetic construct
  source 1..20: mol_type = other RNA
cgagagagcacagcgagggc

SEQ ID NO: 9120 - RNA, 20 nt, synthetic construct
  source 1..20: mol_type = other RNA
cgagatccagccctggacta

SEQ ID NO: 9121 - RNA, 20 nt, synthetic construct
  source 1..20: mol_type = other RNA
cgagattgaagtcaagccta

SEQ ID NO: 9122 - RNA, 20 nt, synthetic construct
  source 1..20: mol_type = other RNA
cgagattttaagaaacttaa

SEQ ID NO: 9123 - RNA, 20 nt, synthetic construct
  source 1..20: mol_type = other RNA
cgagcctacccgtcccccac

SEQ ID NO: 9124 - RNA, 20 nt, synthetic construct
  source 1..20: mol_type = other RNA
cgaggcgggaggatggcttg

SEQ ID NO: 9125 - RNA, 20 nt, synthetic construct
  source 1..20: mol_type = other RNA
cgagggccacagagggtgca

SEQ ID NO: 9126 - RNA, 20 nt, synthetic construct
  source 1..20: mol_type = other RNA
cgaggttgggggagggtttc

SEQ ID NO: 9127 - RNA, 20 nt, synthetic construct
  source 1..20: mol_type = other RNA
cgataagcgtcagagcgccg

SEQ ID NO: 9128 - RNA, 20 nt, synthetic construct
  source 1..20: mol_type = other RNA
cgattgctgccatttatccc

SEQ ID NO: 9129 - RNA, 20 nt, synthetic construct
  source 1..20: mol_type = other RNA
cgcaaaagccctggttaggc

SEQ ID NO: 9130 - RNA, 20 nt, synthetic construct
  source 1..20: mol_type = other RNA
cgcaaagcacataaagtcct

SEQ ID NO: 9131 - RNA, 20 nt, synthetic construct
  source 1..20: mol_type = other RNA
cgcacccccttccccactcc

SEQ ID NO: 9132 - RNA, 20 nt, synthetic construct
  source 1..20: mol_type = other RNA
cgcacccgggacgcgcgcta

SEQ ID NO: 9133 - RNA, 20 nt, synthetic construct
  source 1..20: mol_type = other RNA
cgcagaaggcaggcgttttt

SEQ ID NO: 9134 - RNA, 20 nt, synthetic construct
  source 1..20: mol_type = other RNA
cgcagcagacaggcttaccc

SEQ ID NO: 9135 - RNA, 20 nt, synthetic construct
  source 1..20: mol_type = other RNA
cgcagctggagtgggggacg

SEQ ID NO: 9136 - RNA, 20 nt, synthetic construct
  source 1..20: mol_type = other RNA
cgcatgccttttggctgtaa

SEQ ID NO: 9137 - RNA, 20 nt, synthetic construct
  source 1..20: mol_type = other RNA
cgcatgtcctagcacctctg

SEQ ID NO: 9138 - RNA, 20 nt, synthetic construct
  source 1..20: mol_type = other RNA
cgccagtgcactccagcgtg

SEQ ID NO: 9139 - RNA, 20 nt, synthetic construct
  source 1..20: mol_type = other RNA
cgccatagataactactatg

SEQ ID NO: 9140 - RNA, 20 nt, synthetic construct
  source 1..20: mol_type = other RNA
cgccatgatagctcaaaagc

SEQ ID NO: 9141 - RNA, 20 nt, synthetic construct
  source 1..20: mol_type = other RNA
cgcccaaccccctcatgttt

SEQ ID NO: 9142 - RNA, 20 nt, synthetic construct
  source 1..20: mol_type = other RNA
cgcccagtttgctctggaga

SEQ ID NO: 9143 - RNA, 20 nt, synthetic construct
  source 1..20: mol_type = other RNA
cgcccctccacgcgttcaca

SEQ ID NO: 9144 - RNA, 20 nt, synthetic construct
  source 1..20: mol_type = other RNA
cgcccgctaagttcgcatgt

SEQ ID NO: 9145 - RNA, 20 nt, synthetic construct
  source 1..20: mol_type = other RNA
cgcccgggtaagcctgtctg

SEQ ID NO: 9146 - RNA, 20 nt, synthetic construct
  source 1..20: mol_type = other RNA
cgccctaaactttgtcccga

SEQ ID NO: 9147 - RNA, 20 nt, synthetic construct
  source 1..20: mol_type = other RNA
cgccgaaaggggcaagtagc

SEQ ID NO: 9148 - RNA, 20 nt, synthetic construct
  source 1..20: mol_type = other RNA
cgccgaggttgggggagggt

SEQ ID NO: 9149 - RNA, 20 nt, synthetic construct
  source 1..20: mol_type = other RNA
cgccgcgcctttgggacgag

SEQ ID NO: 9150 - RNA, 20 nt, synthetic construct
  source 1..20: mol_type = other RNA
cgccgcttccccgagatcca

SEQ ID NO: 9151 - RNA, 20 nt, synthetic construct
  source 1..20: mol_type = other RNA
cgccgtaggccaaaggtctc

SEQ ID NO: 9152 - RNA, 20 nt, synthetic construct
  source 1..20: mol_type = other RNA
cgccgtggggctagtccagg

SEQ ID NO: 9153 - RNA, 20 nt, synthetic construct
  source 1..20: mol_type = other RNA
cgcctagacgaagtccacag

SEQ ID NO: 9154 - RNA, 20 nt, synthetic construct
  source 1..20: mol_type = other RNA
cgcctcagccaccggagcag

SEQ ID NO: 9155 - RNA, 20 nt, synthetic construct
  source 1..20: mol_type = other RNA
cgcctcccccagaccccaag

SEQ ID NO: 9156 - RNA, 20 nt, synthetic construct
  source 1..20: mol_type = other RNA
cgcctgccttctgcgtgaga

SEQ ID NO: 9157 - RNA, 20 nt, synthetic construct
  source 1..20: mol_type = other RNA
cgcctttgggacgagcctac

SEQ ID NO: 9158 - RNA, 20 nt, synthetic construct
  source 1..20: mol_type = other RNA
cgcgaaagagcggaagagaa

SEQ ID NO: 9159 - RNA, 20 nt, synthetic construct
  source 1..20: mol_type = other RNA
cgcgacgtttgtagaatgct

SEQ ID NO: 9160 - RNA, 20 nt, synthetic construct
  source 1..20: mol_type = other RNA
cgcgcctttgggacgagcct

SEQ ID NO: 9161 - RNA, 20 nt, synthetic construct
  source 1..20: mol_type = other RNA
cgcgcgctacttgccccttt

SEQ ID NO: 9162 - RNA, 20 nt, synthetic construct
  source 1..20: mol_type = other RNA
cgcgctacttgcccctttcg

SEQ ID NO: 9163 - RNA, 20 nt, synthetic construct
  source 1..20: mol_type = other RNA
cgcggcgctgaggtttgtga

SEQ ID NO: 9164 - RNA, 20 nt, synthetic construct
  source 1..20: mol_type = other RNA
cgcgtgctgtttcctcccca

SEQ ID NO: 9165 - RNA, 20 nt, synthetic construct
  source 1..20: mol_type = other RNA
cgcgtggaggggcgcttggg

SEQ ID NO: 9166 - RNA, 20 nt, synthetic construct
  source 1..20: mol_type = other RNA
cgcgttcacaaacctcagcg

SEQ ID NO: 9167 - RNA, 20 nt, synthetic construct
  source 1..20: mol_type = other RNA
cgctaagttcgcatgtccta

SEQ ID NO: 9168 - RNA, 20 nt, synthetic construct
  source 1..20: mol_type = other RNA
cgctacttgcccctttcggc

SEQ ID NO: 9169 - RNA, 20 nt, synthetic construct
  source 1..20: mol_type = other RNA
cgctcccgcaaaagccctgg

SEQ ID NO: 9170 - RNA, 20 nt, synthetic construct
  source 1..20: mol_type = other RNA
cgctccgtgacttcccttct

SEQ ID NO: 9171 - RNA, 20 nt, synthetic construct
  source 1..20: mol_type = other RNA
cgctctgacgcttatcgacg

SEQ ID NO: 9172 - RNA, 20 nt, synthetic construct
  source 1..20: mol_type = other RNA
cgctctgcaccctctgtggc

SEQ ID NO: 9173 - RNA, 20 nt, synthetic construct
  source 1..20: mol_type = other RNA
cgctctggtccttcctctcc

SEQ ID NO: 9174 - RNA, 20 nt, synthetic construct
  source 1..20: mol_type = other RNA
cgctctgttgcccacgctgg

SEQ ID NO: 9175 - RNA, 20 nt, synthetic construct
  source 1..20: mol_type = other RNA
cgctctttcgcggggcctct

SEQ ID NO: 9176 - RNA, 20 nt, synthetic construct
  source 1..20: mol_type = other RNA
cgctgaggtttgtgaacgcg

SEQ ID NO: 9177 - RNA, 20 nt, synthetic construct
  source 1..20: mol_type = other RNA
cgctggagtgcactggcgcc

SEQ ID NO: 9178 - RNA, 20 nt, synthetic construct
  source 1..20: mol_type = other RNA
cgctgggggagccagaggcc

SEQ ID NO: 9179 - RNA, 20 nt, synthetic construct
  source 1..20: mol_type = other RNA
cgctgtgctctctcgctccg

SEQ ID NO: 9180 - RNA, 20 nt, synthetic construct
  source 1..20: mol_type = other RNA
cgcttatcgacgccctaaac

SEQ ID NO: 9181 - RNA, 20 nt, synthetic construct
  source 1..20: mol_type = other RNA
cgcttccccgagatccagcc

SEQ ID NO: 9182 - RNA, 20 nt, synthetic construct
  source 1..20: mol_type = other RNA
cgcttggggtctgggggagg

SEQ ID NO: 9183 - RNA, 20 nt, synthetic construct
  source 1..20: mol_type = other RNA
cgctttgtatcacagccaag

SEQ ID NO: 9184 - RNA, 20 nt, synthetic construct
  source 1..20: mol_type = other RNA
cggaagagaaaccctccccc

SEQ ID NO: 9185 - RNA, 20 nt, synthetic construct
  source 1..20: mol_type = other RNA
cggaagataactgttttcaa

SEQ ID NO: 9186 - RNA, 20 nt, synthetic construct
  source 1..20: mol_type = other RNA
cggacctcaagccatcctcc

SEQ ID NO: 9187 - RNA, 20 nt, synthetic construct
  source 1..20: mol_type = other RNA
cggagcagctgggaccacag

SEQ ID NO: 9188 - RNA, 20 nt, synthetic construct
  source 1..20: mol_type = other RNA
cggagcgagagagcacagcg

SEQ ID NO: 9189 - RNA, 20 nt, synthetic construct
  source 1..20: mol_type = other RNA
cggcatgggccctgtggtct

SEQ ID NO: 9190 - RNA, 20 nt, synthetic construct
  source 1..20: mol_type = other RNA
cggcgacgggagggtcggga

SEQ ID NO: 9191 - RNA, 20 nt, synthetic construct
  source 1..20: mol_type = other RNA
cggcgctctgacgcttatcg

SEQ ID NO: 9192 - RNA, 20 nt, synthetic construct
  source 1..20: mol_type = other RNA
cggcgctgaggtttgtgaac

SEQ ID NO: 9193 - RNA, 20 nt, synthetic construct
  source 1..20: mol_type = other RNA
cggcgggccaccaaggagaa

SEQ ID NO: 9194 - RNA, 20 nt, synthetic construct
  source 1..20: mol_type = other RNA
cggcggggagcaggggagac

SEQ ID NO: 9195 - RNA, 20 nt, synthetic construct
  source 1..20: mol_type = other RNA
cggcggggtggcctgggagt

SEQ ID NO: 9196 - RNA, 20 nt, synthetic construct
  source 1..20: mol_type = other RNA
cggctaatttttgttattat

SEQ ID NO: 9197 - RNA, 20 nt, synthetic construct
  source 1..20: mol_type = other RNA
cggctctgcttcccttagac

SEQ ID NO: 9198 - RNA, 20 nt, synthetic construct
  source 1..20: mol_type = other RNA
cgggacaaagtttagggcgt

SEQ ID NO: 9199 - RNA, 20 nt, synthetic construct
  source 1..20: mol_type = other RNA
cgggacgcgcgctacttgcc

SEQ ID NO: 9200 - RNA, 20 nt, synthetic construct
  source 1..20: mol_type = other RNA
cgggagaggaaggaccagag

SEQ ID NO: 9201 - RNA, 20 nt, synthetic construct
  source 1..20: mol_type = other RNA
cgggagcgcatgccttttgg

SEQ ID NO: 9202 - RNA, 20 nt, synthetic construct
  source 1..20: mol_type = other RNA
cgggaggatctcttgagctt

SEQ ID NO: 9203 - RNA, 20 nt, synthetic construct
  source 1..20: mol_type = other RNA
cgggaggatggcttgaggtc

SEQ ID NO: 9204 - RNA, 20 nt, synthetic construct
  source 1..20: mol_type = other RNA
cgggagggtcgggacaaagt

SEQ ID NO: 9205 - RNA, 20 nt, synthetic construct
  source 1..20: mol_type = other RNA
cgggccaccaaggagaactt

SEQ ID NO: 9206 - RNA, 20 nt, synthetic construct
  source 1..20: mol_type = other RNA
cgggcgacgcctcccccaga

SEQ ID NO: 9207 - RNA, 20 nt, synthetic construct
  source 1..20: mol_type = other RNA
cgggcgcctagacgaagtcc

SEQ ID NO: 9208 - RNA, 20 nt, synthetic construct
  source 1..20: mol_type = other RNA
cggggagcaggggagacctt

SEQ ID NO: 9209 - RNA, 20 nt, synthetic construct
  source 1..20: mol_type = other RNA
cggggcctctggctccccca

SEQ ID NO: 9210 - RNA, 20 nt, synthetic construct
  source 1..20: mol_type = other RNA
cggggtggcctgggagtggg

SEQ ID NO: 9211 - RNA, 20 nt, synthetic construct
  source 1..20: mol_type = other RNA
cgggtaagcctgtctgctgc

SEQ ID NO: 9212 - RNA, 20 nt, synthetic construct
  source 1..20: mol_type = other RNA
cgggtaggctcgtcccaaag

SEQ ID NO: 9213 - RNA, 20 nt, synthetic construct
  source 1..20: mol_type = other RNA
cgggtagttcttataatttt

SEQ ID NO: 9214 - RNA, 20 nt, synthetic construct
  source 1..20: mol_type = other RNA
cgggtgcgcacccccttccc

SEQ ID NO: 9215 - RNA, 20 nt, synthetic construct
  source 1..20: mol_type = other RNA
cgggtgtggtggctcgtgcc

SEQ ID NO: 9216 - RNA, 20 nt, synthetic construct
  source 1..20: mol_type = other RNA
cggtgccttagtttcttcat

SEQ ID NO: 9217 - RNA, 20 nt, synthetic construct
  source 1..20: mol_type = other RNA
cggtggctgaggcgggagga

SEQ ID NO: 9218 - RNA, 20 nt, synthetic construct
  source 1..20: mol_type = other RNA
cggtgtggccccacatagac

SEQ ID NO: 9219 - RNA, 20 nt, synthetic construct
  source 1..20: mol_type = other RNA
cggtttcgaataattaactt

SEQ ID NO: 9220 - RNA, 20 nt, synthetic construct
  source 1..20: mol_type = other RNA
cggttttgaaaacatgaggg

SEQ ID NO: 9221 - RNA, 20 nt, synthetic construct
  source 1..20: mol_type = other RNA
cgtaagctaccacgcccaac

SEQ ID NO: 9222 - RNA, 20 nt, synthetic construct
  source 1..20: mol_type = other RNA
cgtacagagggcttcctctt

SEQ ID NO: 9223 - RNA, 20 nt, synthetic construct
  source 1..20: mol_type = other RNA
cgtaggccaaaggtctcccc

SEQ ID NO: 9224 - RNA, 20 nt, synthetic construct
  source 1..20: mol_type = other RNA
cgtagttgagaccagcctgg

SEQ ID NO: 9225 - RNA, 20 nt, synthetic construct
  source 1..20: mol_type = other RNA
cgtcagagcgccgaggttgg

SEQ ID NO: 9226 - RNA, 20 nt, synthetic construct
  source 1..20: mol_type = other RNA
cgtcatttaattttgaaaac

SEQ ID NO: 9227 - RNA, 20 nt, synthetic construct
  source 1..20: mol_type = other RNA
cgtcccaaaggcgcggcgct

SEQ ID NO: 9228 - RNA, 20 nt, synthetic construct
  source 1..20: mol_type = other RNA
cgtcccccactccagctgcg

SEQ ID NO: 9229 - RNA, 20 nt, synthetic construct
  source 1..20: mol_type = other RNA
cgtcgataagcgtcagagcg

SEQ ID NO: 9230 - RNA, 20 nt, synthetic construct
  source 1..20: mol_type = other RNA
cgtcgcccgggtaagcctgt

SEQ ID NO: 9231 - RNA, 20 nt, synthetic construct
  source 1..20: mol_type = other RNA
cgtcgccgtaggccaaaggt

SEQ ID NO: 9232 - RNA, 20 nt, synthetic construct
  source 1..20: mol_type = other RNA
cgtcgcgtgctgtttcctcc

SEQ ID NO: 9233 - RNA, 20 nt, synthetic construct
  source 1..20: mol_type = other RNA
cgtctaggcgcccgctaagt

SEQ ID NO: 9234 - RNA, 20 nt, synthetic construct
  source 1..20: mol_type = other RNA
cgtgacttcccttctccaag

SEQ ID NO: 9235 - RNA, 20 nt, synthetic construct
  source 1..20: mol_type = other RNA
cgtgagattctccagagcaa

SEQ ID NO: 9236 - RNA, 20 nt, synthetic construct
  source 1..20: mol_type = other RNA
cgtgcctgtggtcccagctg

SEQ ID NO: 9237 - RNA, 20 nt, synthetic construct
  source 1..20: mol_type = other RNA
cgtgctgtttcctccccacg

SEQ ID NO: 9238 - RNA, 20 nt, synthetic construct
  source 1..20: mol_type = other RNA
cgtggaggggcgcttggggt

SEQ ID NO: 9239 - RNA, 20 nt, synthetic construct
  source 1..20: mol_type = other RNA
cgtggggaggaaacagcacg

SEQ ID NO: 9240 - RNA, 20 nt, synthetic construct
  source 1..20: mol_type = other RNA
cgtggggctagtccagggct

SEQ ID NO: 9241 - RNA, 20 nt, synthetic construct
  source 1..20: mol_type = other RNA
cgttattgacatctttctgt

SEQ ID NO: 9242 - RNA, 20 nt, synthetic construct
  source 1..20: mol_type = other RNA
cgttcacaaacctcagcgcc

SEQ ID NO: 9243 - RNA, 20 nt, synthetic construct
  source 1..20: mol_type = other RNA
cgtttgtagaatgcttggct

SEQ ID NO: 9244 - RNA, 20 nt, synthetic construct
  source 1..20: mol_type = other RNA
ctaaactttgtcccgaccct

SEQ ID NO: 9245 - RNA, 20 nt, synthetic construct
  source 1..20: mol_type = other RNA
ctaaccagggcttttgcggg

SEQ ID NO: 9246 - RNA, 20 nt, synthetic construct
  source 1..20: mol_type = other RNA
ctaaggcaccgagattttaa

SEQ ID NO: 9247 - RNA, 20 nt, synthetic construct
  source 1..20: mol_type = other RNA
ctaagggaagcagagccgca

SEQ ID NO: 9248 - RNA, 20 nt, synthetic construct
  source 1..20: mol_type = other RNA
ctaagttcgcatgtcctagc

SEQ ID NO: 9249 - RNA, 20 nt, synthetic construct
  source 1..20: mol_type = other RNA
ctacaaacgtcgcgtgctgt

SEQ ID NO: 9250 - RNA, 20 nt, synthetic construct
  source 1..20: mol_type = other RNA
ctaccacgcccaaccccctc

SEQ ID NO: 9251 - RNA, 20 nt, synthetic construct
  source 1..20: mol_type = other RNA
ctacccgtcccccactccag

SEQ ID NO: 9252 - RNA, 20 nt, synthetic construct
  source 1..20: mol_type = other RNA
ctacccgttattgacatctt

SEQ ID NO: 9253 - RNA, 20 nt, synthetic construct
  source 1..20: mol_type = other RNA
ctaccctcccgctctggtcc

SEQ ID NO: 9254 - RNA, 20 nt, synthetic construct
  source 1..20: mol_type = other RNA
ctacggacctcaagccatcc

SEQ ID NO: 9255 - RNA, 20 nt, synthetic construct
  source 1..20: mol_type = other RNA
ctacggcgacgggagggtcg

SEQ ID NO: 9256 - RNA, 20 nt, synthetic construct
  source 1..20: mol_type = other RNA
ctactatggttatcttctgc

SEQ ID NO: 9257 - RNA, 20 nt, synthetic construct
  source 1..20: mol_type = other RNA
ctacttgcccctttcggcgg

SEQ ID NO: 9258 - RNA, 20 nt, synthetic construct
  source 1..20: mol_type = other RNA
ctagacgaagtccacagctc

SEQ ID NO: 9259 - RNA, 20 nt, synthetic construct
  source 1..20: mol_type = other RNA
ctagcacctctgggtctatg

SEQ ID NO: 9260 - RNA, 20 nt, synthetic construct
  source 1..20: mol_type = other RNA
ctagccccacggcgggccac

SEQ ID NO: 9261 - RNA, 20 nt, synthetic construct
  source 1..20: mol_type = other RNA
ctaggacatgcgaacttagc

SEQ ID NO: 9262 - RNA, 20 nt, synthetic construct
  source 1..20: mol_type = other RNA
ctaggcgcccgctaagttcg

SEQ ID NO: 9263 - RNA, 20 nt, synthetic construct
  source 1..20: mol_type = other RNA
ctagtccagggctggatctc

SEQ ID NO: 9264 - RNA, 20 nt, synthetic construct
  source 1..20: mol_type = other RNA
ctatcatggcgccagtgcac

SEQ ID NO: 9265 - RNA, 20 nt, synthetic construct
  source 1..20: mol_type = other RNA
ctatggcggaagataactgt

SEQ ID NO: 9266 - RNA, 20 nt, synthetic construct
  source 1..20: mol_type = other RNA
ctatggttatcttctgcctc

SEQ ID NO: 9267 - RNA, 20 nt, synthetic construct
  source 1..20: mol_type = other RNA
ctatgtggggccacaccgtg

SEQ ID NO: 9268 - RNA, 20 nt, synthetic construct
  source 1..20: mol_type = other RNA
ctcaaaagcctaagctcaag

SEQ ID NO: 9269 - RNA, 20 nt, synthetic construct
  source 1..20: mol_type = other RNA
ctcaactacggacctcaagc

SEQ ID NO: 9270 - RNA, 20 nt, synthetic construct
  source 1..20: mol_type = other RNA
ctcacagatgaagaaactaa

SEQ ID NO: 9271 - RNA, 20 nt, synthetic construct
  source 1..20: mol_type = other RNA
ctcacgcagaaggcaggcgt

SEQ ID NO: 9272 - RNA, 20 nt, synthetic construct
  source 1..20: mol_type = other RNA
ctcagccaccggagcagctg

SEQ ID NO: 9273 - RNA, 20 nt, synthetic construct
  source 1..20: mol_type = other RNA
ctcagcgccgcgcctttggg

SEQ ID NO: 9274 - RNA, 20 nt, synthetic construct
  source 1..20: mol_type = other RNA
ctcatgttttcaaaaccgaa

SEQ ID NO: 9275 - RNA, 20 nt, synthetic construct
  source 1..20: mol_type = other RNA
ctccaagttctccttggtgg

SEQ ID NO: 9276 - RNA, 20 nt, synthetic construct
  source 1..20: mol_type = other RNA
ctccacgcgttcacaaacct

SEQ ID NO: 9277 - RNA, 20 nt, synthetic construct
  source 1..20: mol_type = other RNA
ctccagagcaaactgggcgg

SEQ ID NO: 9278 - RNA, 20 nt, synthetic construct
  source 1..20: mol_type = other RNA
ctccagctgcgctgggggag

SEQ ID NO: 9279 - RNA, 20 nt, synthetic construct
  source 1..20: mol_type = other RNA
ctccagtctaagggaagcag

SEQ ID NO: 9280 - RNA, 20 nt, synthetic construct
  source 1..20: mol_type = other RNA
ctccccacggtgtggcccca

SEQ ID NO: 9281 - RNA, 20 nt, synthetic construct
  source 1..20: mol_type = other RNA
ctcccccaacctcggcgctc

SEQ ID NO: 9282 - RNA, 20 nt, synthetic construct
  source 1..20: mol_type = other RNA
ctcccccagaccccaagcgc

SEQ ID NO: 9283 - RNA, 20 nt, synthetic construct
  source 1..20: mol_type = other RNA
ctcccccagcgcagctggag

SEQ ID NO: 9284 - RNA, 20 nt, synthetic construct
  source 1..20: mol_type = other RNA
ctccccgccgaaaggggcaa

SEQ ID NO: 9285 - RNA, 20 nt, synthetic construct
  source 1..20: mol_type = other RNA
ctcccctgctccccgccgaa

SEQ ID NO: 9286 - RNA, 20 nt, synthetic construct
  source 1..20: mol_type = other RNA
ctcccgcaaaagccctggtt

SEQ ID NO: 9287 - RNA, 20 nt, synthetic construct
  source 1..20: mol_type = other RNA
ctcccgcctcagccaccgga

SEQ ID NO: 9288 - RNA, 20 nt, synthetic construct
  source 1..20: mol_type = other RNA
ctcccgctctgcaccctctg

SEQ ID NO: 9289 - RNA, 20 nt, synthetic construct
  source 1..20: mol_type = other RNA
ctcccgctctggtccttcct

SEQ ID NO: 9290 - RNA, 20 nt, synthetic construct
  source 1..20: mol_type = other RNA
ctcccgtcgccgtaggccaa

SEQ ID NO: 9291 - RNA, 20 nt, synthetic construct
  source 1..20: mol_type = other RNA
ctccggtggctgaggcggga

SEQ ID NO: 9292 - RNA, 20 nt, synthetic construct
  source 1..20: mol_type = other RNA
ctccgtgacttcccttctcc

SEQ ID NO: 9293 - RNA, 20 nt, synthetic construct
  source 1..20: mol_type = other RNA
ctcctaccctcccgctctgg

SEQ ID NO: 9294 - RNA, 20 nt, synthetic construct
  source 1..20: mol_type = other RNA
ctccttggtggcccgccgtg

SEQ ID NO: 9295 - RNA, 20 nt, synthetic construct
  source 1..20: mol_type = other RNA
ctcgattgctgccatttatc

SEQ ID NO: 9296 - RNA, 20 nt, synthetic construct
  source 1..20: mol_type = other RNA
ctcgctccgtgacttccctt

SEQ ID NO: 9297 - RNA, 20 nt, synthetic construct
  source 1..20: mol_type = other RNA
ctcgctgtgctctctcgctc

SEQ ID NO: 9298 - RNA, 20 nt, synthetic construct
  source 1..20: mol_type = other RNA
ctcggcgctctgacgcttat

SEQ ID NO: 9299 - RNA, 20 nt, synthetic construct
  source 1..20: mol_type = other RNA
ctcggggaagcggcggggtg

SEQ ID NO: 9300 - RNA, 20 nt, synthetic construct
  source 1..20: mol_type = other RNA
ctcggtgccttagtttcttc

SEQ ID NO: 9301 - RNA, 20 nt, synthetic construct
  source 1..20: mol_type = other RNA
ctcgtcccaaaggcgcggcg

SEQ ID NO: 9302 - RNA, 20 nt, synthetic construct
  source 1..20: mol_type = other RNA
ctcgtgcctgtggtcccagc

SEQ ID NO: 9303 - RNA, 20 nt, synthetic construct
  source 1..20: mol_type = other RNA
ctctcacagatgaagaaact

SEQ ID NO: 9304 - RNA, 20 nt, synthetic construct
  source 1..20: mol_type = other RNA
ctctccagtctaagggaagc

SEQ ID NO: 9305 - RNA, 20 nt, synthetic construct
  source 1..20: mol_type = other RNA
ctctcccgctctgcaccctc

SEQ ID NO: 9306 - RNA, 20 nt, synthetic construct
  source 1..20: mol_type = other RNA
ctctcctaccctcccgctct

SEQ ID NO: 9307 - RNA, 20 nt, synthetic construct
  source 1..20: mol_type = other RNA
ctctcgctccgtgacttccc

SEQ ID NO: 9308 - RNA, 20 nt, synthetic construct
  source 1..20: mol_type = other RNA
ctctctcgctccgtgacttc

SEQ ID NO: 9309 - RNA, 20 nt, synthetic construct
  source 1..20: mol_type = other RNA
ctctgacgcttatcgacgcc

SEQ ID NO: 9310 - RNA, 20 nt, synthetic construct
  source 1..20: mol_type = other RNA
ctctgcaccctctgtggccc

SEQ ID NO: 9311 - RNA, 20 nt, synthetic construct
  source 1..20: mol_type = other RNA
ctctgcttcccttagactgg

SEQ ID NO: 9312 - RNA, 20 nt, synthetic construct
  source 1..20: mol_type = other RNA
ctctggagaatctcacgcag

SEQ ID NO: 9313 - RNA, 20 nt, synthetic construct
  source 1..20: mol_type = other RNA
ctctggctcccccagcgcag

SEQ ID NO: 9314 - RNA, 20 nt, synthetic construct
  source 1..20: mol_type = other RNA
ctctgggtctatgtggggcc

SEQ ID NO: 9315 - RNA, 20 nt, synthetic construct
  source 1..20: mol_type = other RNA
ctctggtccttcctctcccg

SEQ ID NO: 9316 - RNA, 20 nt, synthetic construct
  source 1..20: mol_type = other RNA
ctctgtacgaaaagaccaca

SEQ ID NO: 9317 - RNA, 20 nt, synthetic construct
  source 1..20: mol_type = other RNA
ctctgtggccctcgctgtgc

SEQ ID NO: 9318 - RNA, 20 nt, synthetic construct
  source 1..20: mol_type = other RNA
ctcttactttcggttttgaa

SEQ ID NO: 9319 - RNA, 20 nt, synthetic construct
  source 1..20: mol_type = other RNA
ctcttccgctctttcgcggg

SEQ ID NO: 9320 - RNA, 20 nt, synthetic construct
  source 1..20: mol_type = other RNA
ctcttgagcttaggcttttg

SEQ ID NO: 9321 - RNA, 20 nt, synthetic construct
  source 1..20: mol_type = other RNA
ctctttcgcggggcctctgg

SEQ ID NO: 9322 - RNA, 20 nt, synthetic construct
  source 1..20: mol_type = other RNA
ctctttgcctggttgtttcc

SEQ ID NO: 9323 - RNA, 20 nt, synthetic construct
  source 1..20: mol_type = other RNA
ctctttggctctttgcctgg

SEQ ID NO: 9324 - RNA, 20 nt, synthetic construct
  source 1..20: mol_type = other RNA
ctgacgcttatcgacgccct

SEQ ID NO: 9325 - RNA, 20 nt, synthetic construct
  source 1..20: mol_type = other RNA
ctgaggtttgtgaacgcgtg

SEQ ID NO: 9326 - RNA, 20 nt, synthetic construct
  source 1..20: mol_type = other RNA
ctgcaccctctgtggccctc

SEQ ID NO: 9327 - RNA, 20 nt, synthetic construct
  source 1..20: mol_type = other RNA
ctgccatttatcccctgtgt

SEQ ID NO: 9328 - RNA, 20 nt, synthetic construct
  source 1..20: mol_type = other RNA
ctgcctctcacagatgaaga

SEQ ID NO: 9329 - RNA, 20 nt, synthetic construct
  source 1..20: mol_type = other RNA
ctgccttctgcgtgagattc

SEQ ID NO: 9330 - RNA, 20 nt, synthetic construct
  source 1..20: mol_type = other RNA
ctgcgctgggggagccagag

SEQ ID NO: 9331 - RNA, 20 nt, synthetic construct
  source 1..20: mol_type = other RNA
ctgcggctctgcttccctta

SEQ ID NO: 9332 - RNA, 20 nt, synthetic construct
  source 1..20: mol_type = other RNA
ctgcgtgagattctccagag

SEQ ID NO: 9333 - RNA, 20 nt, synthetic construct
  source 1..20: mol_type = other RNA
ctgctccccgccgaaagggg

SEQ ID NO: 9334 - RNA, 20 nt, synthetic construct
  source 1..20: mol_type = other RNA
ctgctccggtggctgaggcg

SEQ ID NO: 9335 - RNA, 20 nt, synthetic construct
  source 1..20: mol_type = other RNA
ctgctgcggctctgcttccc

SEQ ID NO: 9336 - RNA, 20 nt, synthetic construct
  source 1..20: mol_type = other RNA
ctgcttcccttagactggag

SEQ ID NO: 9337 - RNA, 20 nt, synthetic construct
  source 1..20: mol_type = other RNA
ctggactagccccacggcgg

SEQ ID NO: 9338 - RNA, 20 nt, synthetic construct
  source 1..20: mol_type = other RNA
ctggagaatctcacgcagaa

SEQ ID NO: 9339 - RNA, 20 nt, synthetic construct
  source 1..20: mol_type = other RNA
ctggagagctgtggacttcg

SEQ ID NO: 9340 - RNA, 20 nt, synthetic construct
  source 1..20: mol_type = other RNA
ctggagtgcactggcgccat

SEQ ID NO: 9341 - RNA, 20 nt, synthetic construct
  source 1..20: mol_type = other RNA
ctggagtgggggacgggtag

SEQ ID NO: 9342 - RNA, 20 nt, synthetic construct
  source 1..20: mol_type = other RNA
ctggatctcggggaagcggc

SEQ ID NO: 9343 - RNA, 20 nt, synthetic construct
  source 1..20: mol_type = other RNA
ctggcgccatgatagctcaa

SEQ ID NO: 9344 - RNA, 20 nt, synthetic construct
  source 1..20: mol_type = other RNA
ctggctcccccagcgcagct

SEQ ID NO: 9345 - RNA, 20 nt, synthetic construct
  source 1..20: mol_type = other RNA
ctgggagtggggaagggggt

SEQ ID NO: 9346 - RNA, 20 nt, synthetic construct
  source 1..20: mol_type = other RNA
ctgggcggcatgggccctgt

SEQ ID NO: 9347 - RNA, 20 nt, synthetic construct
  source 1..20: mol_type = other RNA
ctgggggagccagaggcccc

SEQ ID NO: 9348 - RNA, 20 nt, synthetic construct
  source 1..20: mol_type = other RNA
ctgggtctatgtggggccac

SEQ ID NO: 9349 - RNA, 20 nt, synthetic construct
  source 1..20: mol_type = other RNA
ctggtccttcctctcccgct

SEQ ID NO: 9350 - RNA, 20 nt, synthetic construct
  source 1..20: mol_type = other RNA
ctggtctcaactacggacct

SEQ ID NO: 9351 - RNA, 20 nt, synthetic construct
  source 1..20: mol_type = other RNA
ctggtctctacaaaaaataa

SEQ ID NO: 9352 - RNA, 20 nt, synthetic construct
  source 1..20: mol_type = other RNA
ctggttaggcttgacttcaa

SEQ ID NO: 9353 - RNA, 20 nt, synthetic construct
  source 1..20: mol_type = other RNA
ctggttgtttccaagatgta

SEQ ID NO: 9354 - RNA, 20 nt, synthetic construct
  source 1..20: mol_type = other RNA
ctgtaattcgtgcatttttt

SEQ ID NO: 9355 - RNA, 20 nt, synthetic construct
  source 1..20: mol_type = other RNA
ctgtacgaaaagaccacagg

SEQ ID NO: 9356 - RNA, 20 nt, synthetic construct
  source 1..20: mol_type = other RNA
ctgtctgctgcggctctgct

SEQ ID NO: 9357 - RNA, 20 nt, synthetic construct
  source 1..20: mol_type = other RNA
ctgtgagaggcagaagataa

SEQ ID NO: 9358 - RNA, 20 nt, synthetic construct
  source 1..20: mol_type = other RNA
ctgtgatacaaagcggtttc

SEQ ID NO: 9359 - RNA, 20 nt, synthetic construct
  source 1..20: mol_type = other RNA
ctgtgcctcttactttcggt

SEQ ID NO: 9360 - RNA, 20 nt, synthetic construct
  source 1..20: mol_type = other RNA
ctgtgctctctcgctccgtg

SEQ ID NO: 9361 - RNA, 20 nt, synthetic construct
  source 1..20: mol_type = other RNA
ctgtggacttcgtctaggcg

SEQ ID NO: 9362 - RNA, 20 nt, synthetic construct
  source 1..20: mol_type = other RNA
ctgtggccctcgctgtgctc

SEQ ID NO: 9363 - RNA, 20 nt, synthetic construct
  source 1..20: mol_type = other RNA
ctgtggtcccagctgctccg

SEQ ID NO: 9364 - RNA, 20 nt, synthetic construct
  source 1..20: mol_type = other RNA
ctgtggtcttttcgtacaga

SEQ ID NO: 9365 - RNA, 20 nt, synthetic construct
  source 1..20: mol_type = other RNA
ctgtgtaattaagtttctta

SEQ ID NO: 9366 - RNA, 20 nt, synthetic construct
  source 1..20: mol_type = other RNA
ctgtgtgccaaggactttat

SEQ ID NO: 9367 - RNA, 20 nt, synthetic construct
  source 1..20: mol_type = other RNA
ctgttgcccacgctggagtg

SEQ ID NO: 9368 - RNA, 20 nt, synthetic construct
  source 1..20: mol_type = other RNA
ctgtttcctccccacggtgt

SEQ ID NO: 9369 - RNA, 20 nt, synthetic construct
  source 1..20: mol_type = other RNA
cttaaaatctcggtgcctta

SEQ ID NO: 9370 - RNA, 20 nt, synthetic construct
  source 1..20: mol_type = other RNA
cttaattacacaggggataa

SEQ ID NO: 9371 - RNA, 20 nt, synthetic construct
  source 1..20: mol_type = other RNA
cttacccgggcgacgcctcc

SEQ ID NO: 9372 - RNA, 20 nt, synthetic construct
  source 1..20: mol_type = other RNA
cttactttcggttttgaaaa

SEQ ID NO: 9373 - RNA, 20 nt, synthetic construct
  source 1..20: mol_type = other RNA
cttagactggagagctgtgg

SEQ ID NO: 9374 - RNA, 20 nt, synthetic construct
  source 1..20: mol_type = other RNA
cttagcgggcgcctagacga

SEQ ID NO: 9375 - RNA, 20 nt, synthetic construct
  source 1..20: mol_type = other RNA
cttaggcttttgagctatca

SEQ ID NO: 9376 - RNA, 20 nt, synthetic construct
  source 1..20: mol_type = other RNA
cttagggaggccgaggcggg

SEQ ID NO: 9377 - RNA, 20 nt, synthetic construct
  source 1..20: mol_type = other RNA
cttagtttcttcatctgtga

SEQ ID NO: 9378 - RNA, 20 nt, synthetic construct
  source 1..20: mol_type = other RNA
cttatcgacgccctaaactt

SEQ ID NO: 9379 - RNA, 20 nt, synthetic construct
  source 1..20: mol_type = other RNA
cttatttgttcccatcacat

SEQ ID NO: 9380 - RNA, 20 nt, synthetic construct
  source 1..20: mol_type = other RNA
cttcaatctcgattgctgcc

SEQ ID NO: 9381 - RNA, 20 nt, synthetic construct
  source 1..20: mol_type = other RNA
cttcatctgtgagaggcaga

SEQ ID NO: 9382 - RNA, 20 nt, synthetic construct
  source 1..20: mol_type = other RNA
cttccccactcccaggccac

SEQ ID NO: 9383 - RNA, 20 nt, synthetic construct
  source 1..20: mol_type = other RNA
cttccccgagatccagccct

SEQ ID NO: 9384 - RNA, 20 nt, synthetic construct
  source 1..20: mol_type = other RNA
cttcccttagactggagagc

SEQ ID NO: 9385 - RNA, 20 nt, synthetic construct
  source 1..20: mol_type = other RNA
cttcccttctccaagttctc

SEQ ID NO: 9386 - RNA, 20 nt, synthetic construct
  source 1..20: mol_type = other RNA
cttccgccatagataactac

SEQ ID NO: 9387 - RNA, 20 nt, synthetic construct
  source 1..20: mol_type = other RNA
cttccgctctttcgcggggc

SEQ ID NO: 9388 - RNA, 20 nt, synthetic construct
  source 1..20: mol_type = other RNA
cttcctctcccgctctgcac

SEQ ID NO: 9389 - RNA, 20 nt, synthetic construct
  source 1..20: mol_type = other RNA
cttcctctttggctctttgc

SEQ ID NO: 9390 - RNA, 20 nt, synthetic construct
  source 1..20: mol_type = other RNA
cttcgtctaggcgcccgcta

SEQ ID NO: 9391 - RNA, 20 nt, synthetic construct
  source 1..20: mol_type = other RNA
cttctccaagttctccttgg

SEQ ID NO: 9392 - RNA, 20 nt, synthetic construct
  source 1..20: mol_type = other RNA
cttctgcctctcacagatga

SEQ ID NO: 9393 - RNA, 20 nt, synthetic construct
  source 1..20: mol_type = other RNA
cttctgcgtgagattctcca

SEQ ID NO: 9394 - RNA, 20 nt, synthetic construct
  source 1..20: mol_type = other RNA
cttgacttcaatctcgattg

SEQ ID NO: 9395 - RNA, 20 nt, synthetic construct
  source 1..20: mol_type = other RNA
cttgagcttaggcttttgag

SEQ ID NO: 9396 - RNA, 20 nt, synthetic construct
  source 1..20: mol_type = other RNA
cttgaggtccgtagttgaga

SEQ ID NO: 9397 - RNA, 20 nt, synthetic construct
  source 1..20: mol_type = other RNA
cttgcccctttcggcgggga

SEQ ID NO: 9398 - RNA, 20 nt, synthetic construct
  source 1..20: mol_type = other RNA
cttggaaacaaccaggcaaa

SEQ ID NO: 9399 - RNA, 20 nt, synthetic construct
  source 1..20: mol_type = other RNA
cttggagaagggaagtcacg

SEQ ID NO: 9400 - RNA, 20 nt, synthetic construct
  source 1..20: mol_type = other RNA
cttggcacacagaaagatgt

SEQ ID NO: 9401 - RNA, 20 nt, synthetic construct
  source 1..20: mol_type = other RNA
cttggctgtgatacaaagcg

SEQ ID NO: 9402 - RNA, 20 nt, synthetic construct
  source 1..20: mol_type = other RNA
cttggggtctgggggaggcg

SEQ ID NO: 9403 - RNA, 20 nt, synthetic construct
  source 1..20: mol_type = other RNA
cttggtggcccgccgtgggg

SEQ ID NO: 9404 - RNA, 20 nt, synthetic construct
  source 1..20: mol_type = other RNA
ctttatgtgctttgcgtcat

SEQ ID NO: 9405 - RNA, 20 nt, synthetic construct
  source 1..20: mol_type = other RNA
ctttcgcggggcctctggct

SEQ ID NO: 9406 - RNA, 20 nt, synthetic construct
  source 1..20: mol_type = other RNA
ctttcggcggggagcagggg

SEQ ID NO: 9407 - RNA, 20 nt, synthetic construct
  source 1..20: mol_type = other RNA
ctttcggttttgaaaacatg

SEQ ID NO: 9408 - RNA, 20 nt, synthetic construct
  source 1..20: mol_type = other RNA
ctttctgtgtgccaaggact

SEQ ID NO: 9409 - RNA, 20 nt, synthetic construct
  source 1..20: mol_type = other RNA
ctttgcctggttgtttccaa

SEQ ID NO: 9410 - RNA, 20 nt, synthetic construct
  source 1..20: mol_type = other RNA
ctttgcgtcatttaattttg

SEQ ID NO: 9411 - RNA, 20 nt, synthetic construct
  source 1..20: mol_type = other RNA
ctttggcctacggcgacggg

SEQ ID NO: 9412 - RNA, 20 nt, synthetic construct
  source 1..20: mol_type = other RNA
ctttggctctttgcctggtt

SEQ ID NO: 9413 - RNA, 20 nt, synthetic construct
  source 1..20: mol_type = other RNA
ctttgggacgagcctacccg

SEQ ID NO: 9414 - RNA, 20 nt, synthetic construct
  source 1..20: mol_type = other RNA
ctttgtatcacagccaagca

SEQ ID NO: 9415 - RNA, 20 nt, synthetic construct
  source 1..20: mol_type = other RNA
ctttgtcccgaccctcccgt

SEQ ID NO: 9416 - RNA, 20 nt, synthetic construct
  source 1..20: mol_type = other RNA
cttttcgtacagagggcttc

SEQ ID NO: 9417 - RNA, 20 nt, synthetic construct
  source 1..20: mol_type = other RNA
cttttgagctatcatggcgc

SEQ ID NO: 9418 - RNA, 20 nt, synthetic construct
  source 1..20: mol_type = other RNA
cttttgcgggagcgcatgcc

SEQ ID NO: 9419 - RNA, 20 nt, synthetic construct
  source 1..20: mol_type = other RNA
cttttggctgtaattcgtgc

SEQ ID NO: 9420 - RNA, 20 nt, synthetic construct
  source 1..20: mol_type = other RNA
gaaaaacgcctgccttctgc

SEQ ID NO: 9421 - RNA, 20 nt, synthetic construct
  source 1..20: mol_type = other RNA
gaaaacagttatcttccgcc

SEQ ID NO: 9422 - RNA, 20 nt, synthetic construct
  source 1..20: mol_type = other RNA
gaaaacatgagggggttggg

SEQ ID NO: 9423 - RNA, 20 nt, synthetic construct
  source 1..20: mol_type = other RNA
gaaaagaccacagggcccat

SEQ ID NO: 9424 - RNA, 20 nt, synthetic construct
  source 1..20: mol_type = other RNA
gaaacaaccaggcaaagagc

SEQ ID NO: 9425 - RNA, 20 nt, synthetic construct
  source 1..20: mol_type = other RNA
gaaacagcacgcgacgtttg

SEQ ID NO: 9426 - RNA, 20 nt, synthetic construct
  source 1..20: mol_type = other RNA
gaaaccctcccccaacctcg

SEQ ID NO: 9427 - RNA, 20 nt, synthetic construct
  source 1..20: mol_type = other RNA
gaaaccgctttgtatcacag

SEQ ID NO: 9428 - RNA, 20 nt, synthetic construct
  source 1..20: mol_type = other RNA
gaaactaaggcaccgagatt

SEQ ID NO: 9429 - RNA, 20 nt, synthetic construct
  source 1..20: mol_type = other RNA
gaaacttaattacacagggg

SEQ ID NO: 9430 - RNA, 20 nt, synthetic construct
  source 1..20: mol_type = other RNA
gaaagagcggaagagaaacc

SEQ ID NO: 9431 - RNA, 20 nt, synthetic construct
  source 1..20: mol_type = other RNA
gaaagatgtcaataacgggt

SEQ ID NO: 9432 - RNA, 20 nt, synthetic construct
  source 1..20: mol_type = other RNA
gaaaggggcaagtagcgcgc

SEQ ID NO: 9433 - RNA, 20 nt, synthetic construct
  source 1..20: mol_type = other RNA
gaaagtaagaggcacagtac

SEQ ID NO: 9434 - RNA, 20 nt, synthetic construct
  source 1..20: mol_type = other RNA
gaacgcgtggaggggcgctt

SEQ ID NO: 9435 - RNA, 20 nt, synthetic construct
  source 1..20: mol_type = other RNA
gaactacccgttattgacat

SEQ ID NO: 9436 - RNA, 20 nt, synthetic construct
  source 1..20: mol_type = other RNA
gaacttagcgggcgcctaga

SEQ ID NO: 9437 - RNA, 20 nt, synthetic construct
  source 1..20: mol_type = other RNA
gaacttggagaagggaagtc

SEQ ID NO: 9438 - RNA, 20 nt, synthetic construct
  source 1..20: mol_type = other RNA
gaagaaactaaggcaccgag

SEQ ID NO: 9439 - RNA, 20 nt, synthetic construct
  source 1..20: mol_type = other RNA
gaagagaaaccctcccccaa

SEQ ID NO: 9440 - RNA, 20 nt, synthetic construct
  source 1..20: mol_type = other RNA
gaagataaccatagtagtta

SEQ ID NO: 9441 - RNA, 20 nt, synthetic construct
  source 1..20: mol_type = other RNA
gaagataactgttttcaaaa

SEQ ID NO: 9442 - RNA, 20 nt, synthetic construct
  source 1..20: mol_type = other RNA
gaagcagagccgcagcagac

SEQ ID NO: 9443 - RNA, 20 nt, synthetic construct
  source 1..20: mol_type = other RNA
gaagccctctgtacgaaaag

SEQ ID NO: 9444 - RNA, 20 nt, synthetic construct
  source 1..20: mol_type = other RNA
gaagcctggtctctacaaaa

SEQ ID NO: 9445 - RNA, 20 nt, synthetic construct
  source 1..20: mol_type = other RNA
gaagcggcggggtggcctgg

SEQ ID NO: 9446 - RNA, 20 nt, synthetic construct
  source 1..20: mol_type = other RNA
gaaggaccagagcgggaggg

SEQ ID NO: 9447 - RNA, 20 nt, synthetic construct
  source 1..20: mol_type = other RNA
gaaggcaggcgtttttctta

SEQ ID NO: 9448 - RNA, 20 nt, synthetic construct
  source 1..20: mol_type = other RNA
gaagggaagtcacggagcga

SEQ ID NO: 9449 - RNA, 20 nt, synthetic construct
  source 1..20: mol_type = other RNA
gaagggggtgcgcacccggg

SEQ ID NO: 9450 - RNA, 20 nt, synthetic construct
  source 1..20: mol_type = other RNA
gaagtcaagcctaaccaggg

SEQ ID NO: 9451 - RNA, 20 nt, synthetic construct
  source 1..20: mol_type = other RNA
gaagtcacggagcgagagag

SEQ ID NO: 9452 - RNA, 20 nt, synthetic construct
  source 1..20: mol_type = other RNA
gaagtccacagctctccagt

SEQ ID NO: 9453 - RNA, 20 nt, synthetic construct
  source 1..20: mol_type = other RNA
gaatctcacgcagaaggcag

SEQ ID NO: 9454 - RNA, 20 nt, synthetic construct
  source 1..20: mol_type = other RNA
gaatgcttggctgtgataca

SEQ ID NO: 9455 - RNA, 20 nt, synthetic construct
  source 1..20: mol_type = other RNA
gaattacagccaaaaggcat

SEQ ID NO: 9456 - RNA, 20 nt, synthetic construct
  source 1..20: mol_type = other RNA
gacaaagtttagggcgtcga

SEQ ID NO: 9457 - RNA, 20 nt, synthetic construct
  source 1..20: mol_type = other RNA
gacaggcttacccgggcgac

SEQ ID NO: 9458 - RNA, 20 nt, synthetic construct
  source 1..20: mol_type = other RNA
gacatctttctgtgtgccaa

SEQ ID NO: 9459 - RNA, 20 nt, synthetic construct
  source 1..20: mol_type = other RNA
gacatgcgaacttagcgggc

SEQ ID NO: 9460 - RNA, 20 nt, synthetic construct
  source 1..20: mol_type = other RNA
gacatgtgatgggaacaaat

SEQ ID NO: 9461 - RNA, 20 nt, synthetic construct
  source 1..20: mol_type = other RNA
gaccacaggcacgagccacc

SEQ ID NO: 9462 - RNA, 20 nt, synthetic construct
  source 1..20: mol_type = other RNA
gaccacagggcccatgccgc

SEQ ID NO: 9463 - RNA, 20 nt, synthetic construct
  source 1..20: mol_type = other RNA
gaccagagcgggagggtagg

SEQ ID NO: 9464 - RNA, 20 nt, synthetic construct
  source 1..20: mol_type = other RNA
gacccagaggtgctaggaca

SEQ ID NO: 9465 - RNA, 20 nt, synthetic construct
  source 1..20: mol_type = other RNA
gaccccaagcgcccctccac

SEQ ID NO: 9466 - RNA, 20 nt, synthetic construct
  source 1..20: mol_type = other RNA
gaccctcccgtcgccgtagg

SEQ ID NO: 9467 - RNA, 20 nt, synthetic construct
  source 1..20: mol_type = other RNA
gacctcaagccatcctcccg

SEQ ID NO: 9468 - RNA, 20 nt, synthetic construct
  source 1..20: mol_type = other RNA
gacctttggcctacggcgac

SEQ ID NO: 9469 - RNA, 20 nt, synthetic construct
  source 1..20: mol_type = other RNA
gacgaagtccacagctctcc

SEQ ID NO: 9470 - RNA, 20 nt, synthetic construct
  source 1..20: mol_type = other RNA
gacgagcctacccgtccccc

SEQ ID NO: 9471 - RNA, 20 nt, synthetic construct
  source 1..20: mol_type = other RNA
gacgcaaagcacataaagtc

SEQ ID NO: 9472 - RNA, 20 nt, synthetic construct
  source 1..20: mol_type = other RNA
gacgccctaaactttgtccc

SEQ ID NO: 9473 - RNA, 20 nt, synthetic construct
  source 1..20: mol_type = other RNA
gacgcctcccccagacccca

SEQ ID NO: 9474 - RNA, 20 nt, synthetic construct
  source 1..20: mol_type = other RNA
gacgcgcgctacttgcccct

SEQ ID NO: 9475 - RNA, 20 nt, synthetic construct
  source 1..20: mol_type = other RNA
gacgcttatcgacgccctaa

SEQ ID NO: 9476 - RNA, 20 nt, synthetic construct
  source 1..20: mol_type = other RNA
gacgggagggtcgggacaaa

SEQ ID NO: 9477 - RNA, 20 nt, synthetic construct
  source 1..20: mol_type = other RNA
gacgggtaggctcgtcccaa

SEQ ID NO: 9478 - RNA, 20 nt, synthetic construct
  source 1..20: mol_type = other RNA
gacgtttgtagaatgcttgg

SEQ ID NO: 9479 - RNA, 20 nt, synthetic construct
  source 1..20: mol_type = other RNA
gactagccccacggcgggcc

SEQ ID NO: 9480 - RNA, 20 nt, synthetic construct
  source 1..20: mol_type = other RNA
gactggagagctgtggactt

SEQ ID NO: 9481 - RNA, 20 nt, synthetic construct
  source 1..20: mol_type = other RNA
gacttcaatctcgattgctg

SEQ ID NO: 9482 - RNA, 20 nt, synthetic construct
  source 1..20: mol_type = other RNA
gacttcccttctccaagttc

SEQ ID NO: 9483 - RNA, 20 nt, synthetic construct
  source 1..20: mol_type = other RNA
gacttcgtctaggcgcccgc

SEQ ID NO: 9484 - RNA, 20 nt, synthetic construct
  source 1..20: mol_type = other RNA
gactttatgtgctttgcgtc

SEQ ID NO: 9485 - RNA, 20 nt, synthetic construct
  source 1..20: mol_type = other RNA
gagaaaccctcccccaacct

SEQ ID NO: 9486 - RNA, 20 nt, synthetic construct
  source 1..20: mol_type = other RNA
gagaacttggagaagggaag

SEQ ID NO: 9487 - RNA, 20 nt, synthetic construct
  source 1..20: mol_type = other RNA
gagaagggaagtcacggagc

SEQ ID NO: 9488 - RNA, 20 nt, synthetic construct
  source 1..20: mol_type = other RNA
gagaatctcacgcagaaggc

SEQ ID NO: 9489 - RNA, 20 nt, synthetic construct
  source 1..20: mol_type = other RNA
gagacctttggcctacggcg

SEQ ID NO: 9490 - RNA, 20 nt, synthetic construct
  source 1..20: mol_type = other RNA
gagagagcacagcgagggcc

SEQ ID NO: 9491 - RNA, 20 nt, synthetic construct
  source 1..20: mol_type = other RNA
gagagcacagcgagggccac

SEQ ID NO: 9492 - RNA, 20 nt, synthetic construct
  source 1..20: mol_type = other RNA
gagagctgtggacttcgtct

SEQ ID NO: 9493 - RNA, 20 nt, synthetic construct
  source 1..20: mol_type = other RNA
gagaggaaggaccagagcgg

SEQ ID NO: 9494 - RNA, 20 nt, synthetic construct
  source 1..20: mol_type = other RNA
gagaggcagaagataaccat

SEQ ID NO: 9495 - RNA, 20 nt, synthetic construct
  source 1..20: mol_type = other RNA
gagatccagccctggactag

SEQ ID NO: 9496 - RNA, 20 nt, synthetic construct
  source 1..20: mol_type = other RNA
gagatcctcccgcctcagcc

SEQ ID NO: 9497 - RNA, 20 nt, synthetic construct
  source 1..20: mol_type = other RNA
gagattctccagagcaaact

SEQ ID NO: 9498 - RNA, 20 nt, synthetic construct
  source 1..20: mol_type = other RNA
gagattgaagtcaagcctaa

SEQ ID NO: 9499 - RNA, 20 nt, synthetic construct
  source 1..20: mol_type = other RNA
gagcaaactgggcggcatgg

SEQ ID NO: 9500 - RNA, 20 nt, synthetic construct
  source 1..20: mol_type = other RNA
gagcacagcgagggccacag

SEQ ID NO: 9501 - RNA, 20 nt, synthetic construct
  source 1..20: mol_type = other RNA
gagcagctgggaccacaggc

SEQ ID NO: 9502 - RNA, 20 nt, synthetic construct
  source 1..20: mol_type = other RNA
gagcaggggagacctttggc

SEQ ID NO: 9503 - RNA, 20 nt, synthetic construct
  source 1..20: mol_type = other RNA
gagccaaagaggaagccctc

SEQ ID NO: 9504 - RNA, 20 nt, synthetic construct
  source 1..20: mol_type = other RNA
gagccagaggccccgcgaaa

SEQ ID NO: 9505 - RNA, 20 nt, synthetic construct
  source 1..20: mol_type = other RNA
gagccgcagcagacaggctt

SEQ ID NO: 9506 - RNA, 20 nt, synthetic construct
  source 1..20: mol_type = other RNA
gagcctacccgtcccccact

SEQ ID NO: 9507 - RNA, 20 nt, synthetic construct
  source 1..20: mol_type = other RNA
gagcgagagagcacagcgag

SEQ ID NO: 9508 - RNA, 20 nt, synthetic construct
  source 1..20: mol_type = other RNA
gagcgcatgccttttggctg

SEQ ID NO: 9509 - RNA, 20 nt, synthetic construct
  source 1..20: mol_type = other RNA
gagcgccgaggttgggggag

SEQ ID NO: 9510 - RNA, 20 nt, synthetic construct
  source 1..20: mol_type = other RNA
gagcggaagagaaaccctcc

SEQ ID NO: 9511 - RNA, 20 nt, synthetic construct
  source 1..20: mol_type = other RNA
gagcgggagaggaaggacca

SEQ ID NO: 9512 - RNA, 20 nt, synthetic construct
  source 1..20: mol_type = other RNA
gagctatcatggcgccagtg

SEQ ID NO: 9513 - RNA, 20 nt, synthetic construct
  source 1..20: mol_type = other RNA
gagctgtggacttcgtctag

SEQ ID NO: 9514 - RNA, 20 nt, synthetic construct
  source 1..20: mol_type = other RNA
gagcttaggcttttgagcta

SEQ ID NO: 9515 - RNA, 20 nt, synthetic construct
  source 1..20: mol_type = other RNA
gaggaaacagcacgcgacgt

SEQ ID NO: 9516 - RNA, 20 nt, synthetic construct
  source 1..20: mol_type = other RNA
gaggaagccctctgtacgaa

SEQ ID NO: 9517 - RNA, 20 nt, synthetic construct
  source 1..20: mol_type = other RNA
gaggaaggaccagagcggga

SEQ ID NO: 9518 - RNA, 20 nt, synthetic construct
  source 1..20: mol_type = other RNA
gaggatctcttgagcttagg

SEQ ID NO: 9519 - RNA, 20 nt, synthetic construct
  source 1..20: mol_type = other RNA
gaggatggcttgaggtccgt

SEQ ID NO: 9520 - RNA, 20 nt, synthetic construct
  source 1..20: mol_type = other RNA
gaggcacagtacatcttgga

SEQ ID NO: 9521 - RNA, 20 nt, synthetic construct
  source 1..20: mol_type = other RNA
gaggcagaagataaccatag

SEQ ID NO: 9522 - RNA, 20 nt, synthetic construct
  source 1..20: mol_type = other RNA
gaggccccgcgaaagagcgg

SEQ ID NO: 9523 - RNA, 20 nt, synthetic construct
  source 1..20: mol_type = other RNA
gaggcgggaggatctcttga

SEQ ID NO: 9524 - RNA, 20 nt, synthetic construct
  source 1..20: mol_type = other RNA
gaggcgggaggatggcttga

SEQ ID NO: 9525 - RNA, 20 nt, synthetic construct
  source 1..20: mol_type = other RNA
gaggcgtcgcccgggtaagc

SEQ ID NO: 9526 - RNA, 20 nt, synthetic construct
  source 1..20: mol_type = other RNA
gagggccacagagggtgcag

SEQ ID NO: 9527 - RNA, 20 nt, synthetic construct
  source 1..20: mol_type = other RNA
gagggcttcctctttggctc

SEQ ID NO: 9528 - RNA, 20 nt, synthetic construct
  source 1..20: mol_type = other RNA
gaggggcgcttggggtctgg

SEQ ID NO: 9529 - RNA, 20 nt, synthetic construct
  source 1..20: mol_type = other RNA
gagggggttgggcgtggtag

SEQ ID NO: 9530 - RNA, 20 nt, synthetic construct
  source 1..20: mol_type = other RNA
gagggtcgggacaaagttta

SEQ ID NO: 9531 - RNA, 20 nt, synthetic construct
  source 1..20: mol_type = other RNA
gagggtgcagagcgggagag

SEQ ID NO: 9532 - RNA, 20 nt, synthetic construct
  source 1..20: mol_type = other RNA
gagggtttctcttccgctct

SEQ ID NO: 9533 - RNA, 20 nt, synthetic construct
  source 1..20: mol_type = other RNA
gaggtccgtagttgagacca

SEQ ID NO: 9534 - RNA, 20 nt, synthetic construct
  source 1..20: mol_type = other RNA
gaggtgctaggacatgcgaa

SEQ ID NO: 9535 - RNA, 20 nt, synthetic construct
  source 1..20: mol_type = other RNA
gaggttgggggagggtttct

SEQ ID NO: 9536 - RNA, 20 nt, synthetic construct
  source 1..20: mol_type = other RNA
gaggtttgtgaacgcgtgga

SEQ ID NO: 9537 - RNA, 20 nt, synthetic construct
  source 1..20: mol_type = other RNA
gagtctctcctaccctcccg

SEQ ID NO: 9538 - RNA, 20 nt, synthetic construct
  source 1..20: mol_type = other RNA
gagtgcactggcgccatgat

SEQ ID NO: 9539 - RNA, 20 nt, synthetic construct
  source 1..20: mol_type = other RNA
gagtggggaagggggtgcgc

SEQ ID NO: 9540 - RNA, 20 nt, synthetic construct
  source 1..20: mol_type = other RNA
gagtgggggacgggtaggct

SEQ ID NO: 9541 - RNA, 20 nt, synthetic construct
  source 1..20: mol_type = other RNA
gataaatggcagcaatcgag

SEQ ID NO: 9542 - RNA, 20 nt, synthetic construct
  source 1..20: mol_type = other RNA
gataaccatagtagttatct

SEQ ID NO: 9543 - RNA, 20 nt, synthetic construct
  source 1..20: mol_type = other RNA
gataactactatggttatct

SEQ ID NO: 9544 - RNA, 20 nt, synthetic construct
  source 1..20: mol_type = other RNA
gataagcgtcagagcgccga

SEQ ID NO: 9545 - RNA, 20 nt, synthetic construct
  source 1..20: mol_type = other RNA
gatacaaagcggtttcgaat

SEQ ID NO: 9546 - RNA, 20 nt, synthetic construct
  source 1..20: mol_type = other RNA
gatagctcaaaagcctaagc

SEQ ID NO: 9547 - RNA, 20 nt, synthetic construct
  source 1..20: mol_type = other RNA
gatccagccctggactagcc

SEQ ID NO: 9548 - RNA, 20 nt, synthetic construct
  source 1..20: mol_type = other RNA
gatcctcccgcctcagccac

SEQ ID NO: 9549 - RNA, 20 nt, synthetic construct
  source 1..20: mol_type = other RNA
gatctcggggaagcggcggg

SEQ ID NO: 9550 - RNA, 20 nt, synthetic construct
  source 1..20: mol_type = other RNA
gatctcttgagcttaggctt

SEQ ID NO: 9551 - RNA, 20 nt, synthetic construct
  source 1..20: mol_type = other RNA
gatgaagaaactaaggcacc

SEQ ID NO: 9552 - RNA, 20 nt, synthetic construct
  source 1..20: mol_type = other RNA
gatggcttgaggtccgtagt

SEQ ID NO: 9553 - RNA, 20 nt, synthetic construct
  source 1..20: mol_type = other RNA
gatgggaacaaataagttaa

SEQ ID NO: 9554 - RNA, 20 nt, synthetic construct
  source 1..20: mol_type = other RNA
gatgtactgtgcctcttact

SEQ ID NO: 9555 - RNA, 20 nt, synthetic construct
  source 1..20: mol_type = other RNA
gatgtcaataacgggtagtt

SEQ ID NO: 9556 - RNA, 20 nt, synthetic construct
  source 1..20: mol_type = other RNA
gattacaggcgtaagctacc

SEQ ID NO: 9557 - RNA, 20 nt, synthetic construct
  source 1..20: mol_type = other RNA
gattctccagagcaaactgg

SEQ ID NO: 9558 - RNA, 20 nt, synthetic construct
  source 1..20: mol_type = other RNA
gattgaagtcaagcctaacc

SEQ ID NO: 9559 - RNA, 20 nt, synthetic construct
  source 1..20: mol_type = other RNA
gattgctgccatttatcccc

SEQ ID NO: 9560 - RNA, 20 nt, synthetic construct
  source 1..20: mol_type = other RNA
gcaaaagccctggttaggct

SEQ ID NO: 9561 - RNA, 20 nt, synthetic construct
  source 1..20: mol_type = other RNA
gcaaactgggcggcatgggc

SEQ ID NO: 9562 - RNA, 20 nt, synthetic construct
  source 1..20: mol_type = other RNA
gcaaagagccaaagaggaag

SEQ ID NO: 9563 - RNA, 20 nt, synthetic construct
  source 1..20: mol_type = other RNA
gcaaagcacataaagtcctt

SEQ ID NO: 9564 - RNA, 20 nt, synthetic construct
  source 1..20: mol_type = other RNA
gcaagtagcgcgcgtcccgg

SEQ ID NO: 9565 - RNA, 20 nt, synthetic construct
  source 1..20: mol_type = other RNA
gcaatcgagattgaagtcaa

SEQ ID NO: 9566 - RNA, 20 nt, synthetic construct
  source 1..20: mol_type = other RNA
gcacacagaaagatgtcaat

SEQ ID NO: 9567 - RNA, 20 nt, synthetic construct
  source 1..20: mol_type = other RNA
gcacagcgagggccacagag

SEQ ID NO: 9568 - RNA, 20 nt, synthetic construct
  source 1..20: mol_type = other RNA
gcacagtacatcttggaaac

SEQ ID NO: 9569 - RNA, 20 nt, synthetic construct
  source 1..20: mol_type = other RNA
gcacataaagtccttggcac

SEQ ID NO: 9570 - RNA, 20 nt, synthetic construct
  source 1..20: mol_type = other RNA
gcacccccttccccactccc

SEQ ID NO: 9571 - RNA, 20 nt, synthetic construct
  source 1..20: mol_type = other RNA
gcacccgggacgcgcgctac

SEQ ID NO: 9572 - RNA, 20 nt, synthetic construct
  source 1..20: mol_type = other RNA
gcaccctctgtggccctcgc

SEQ ID NO: 9573 - RNA, 20 nt, synthetic construct
  source 1..20: mol_type = other RNA
gcaccgagattttaagaaac

SEQ ID NO: 9574 - RNA, 20 nt, synthetic construct
  source 1..20: mol_type = other RNA
gcacctctgggtctatgtgg

SEQ ID NO: 9575 - RNA, 20 nt, synthetic construct
  source 1..20: mol_type = other RNA
gcacgaattacagccaaaag

SEQ ID NO: 9576 - RNA, 20 nt, synthetic construct
  source 1..20: mol_type = other RNA
gcacgcgacgtttgtagaat

SEQ ID NO: 9577 - RNA, 20 nt, synthetic construct
  source 1..20: mol_type = other RNA
gcactggcgccatgatagct

SEQ ID NO: 9578 - RNA, 20 nt, synthetic construct
  source 1..20: mol_type = other RNA
gcagaagataaccatagtag

SEQ ID NO: 9579 - RNA, 20 nt, synthetic construct
  source 1..20: mol_type = other RNA
gcagaaggcaggcgtttttc

SEQ ID NO: 9580 - RNA, 20 nt, synthetic construct
  source 1..20: mol_type = other RNA
gcagacaggcttacccgggc

SEQ ID NO: 9581 - RNA, 20 nt, synthetic construct
  source 1..20: mol_type = other RNA
gcagagccgcagcagacagg

SEQ ID NO: 9582 - RNA, 20 nt, synthetic construct
  source 1..20: mol_type = other RNA
gcagagcgggagaggaagga

SEQ ID NO: 9583 - RNA, 20 nt, synthetic construct
  source 1..20: mol_type = other RNA
gcagcaatcgagattgaagt

SEQ ID NO: 9584 - RNA, 20 nt, synthetic construct
  source 1..20: mol_type = other RNA
gcagcagacaggcttacccg

SEQ ID NO: 9585 - RNA, 20 nt, synthetic construct
  source 1..20: mol_type = other RNA
gcagctggagtgggggacgg

SEQ ID NO: 9586 - RNA, 20 nt, synthetic construct
  source 1..20: mol_type = other RNA
gcagctgggaccacaggcac

SEQ ID NO: 9587 - RNA, 20 nt, synthetic construct
  source 1..20: mol_type = other RNA
gcaggcgtttttcttaaaaa

SEQ ID NO: 9588 - RNA, 20 nt, synthetic construct
  source 1..20: mol_type = other RNA
gcaggggagacctttggcct

SEQ ID NO: 9589 - RNA, 20 nt, synthetic construct
  source 1..20: mol_type = other RNA
gcatgccttttggctgtaat

SEQ ID NO: 9590 - RNA, 20 nt, synthetic construct
  source 1..20: mol_type = other RNA
gcatgcgctcccgcaaaagc

SEQ ID NO: 9591 - RNA, 20 nt, synthetic construct
  source 1..20: mol_type = other RNA
gcatgggccctgtggtcttt

SEQ ID NO: 9592 - RNA, 20 nt, synthetic construct
  source 1..20: mol_type = other RNA
gcatgtcctagcacctctgg

SEQ ID NO: 9593 - RNA, 20 nt, synthetic construct
  source 1..20: mol_type = other RNA
gcattctacaaacgtcgcgt

SEQ ID NO: 9594 - RNA, 20 nt, synthetic construct
  source 1..20: mol_type = other RNA
gccaaaaggcatgcgctccc

SEQ ID NO: 9595 - RNA, 20 nt, synthetic construct
  source 1..20: mol_type = other RNA
gccaaagaggaagccctctg

SEQ ID NO: 9596 - RNA, 20 nt, synthetic construct
  source 1..20: mol_type = other RNA
gccaaaggtctcccctgctc

SEQ ID NO: 9597 - RNA, 20 nt, synthetic construct
  source 1..20: mol_type = other RNA
gccaacatggtgaagcctgg

SEQ ID NO: 9598 - RNA, 20 nt, synthetic construct
  source 1..20: mol_type = other RNA
gccaagcattctacaaacgt

SEQ ID NO: 9599 - RNA, 20 nt, synthetic construct
  source 1..20: mol_type = other RNA
gccaaggactttatgtgctt

SEQ ID NO: 9600 - RNA, 20 nt, synthetic construct
  source 1..20: mol_type = other RNA
gccacaccgtggggaggaaa

SEQ ID NO: 9601 - RNA, 20 nt, synthetic construct
  source 1..20: mol_type = other RNA
gccacagagggtgcagagcg

SEQ ID NO: 9602 - RNA, 20 nt, synthetic construct
  source 1..20: mol_type = other RNA
gccaccaaggagaacttgga

SEQ ID NO: 9603 - RNA, 20 nt, synthetic construct
  source 1..20: mol_type = other RNA
gccaccggagcagctgggac

SEQ ID NO: 9604 - RNA, 20 nt, synthetic construct
  source 1..20: mol_type = other RNA
gccagaggccccgcgaaaga

SEQ ID NO: 9605 - RNA, 20 nt, synthetic construct
  source 1..20: mol_type = other RNA
gccaggctggtctcaactac

SEQ ID NO: 9606 - RNA, 20 nt, synthetic construct
  source 1..20: mol_type = other RNA
gccatagataactactatgg

SEQ ID NO: 9607 - RNA, 20 nt, synthetic construct
  source 1..20: mol_type = other RNA
gccatcctcccgcctcggcc

SEQ ID NO: 9608 - RNA, 20 nt, synthetic construct
  source 1..20: mol_type = other RNA
gccatgatagctcaaaagcc

SEQ ID NO: 9609 - RNA, 20 nt, synthetic construct
  source 1..20: mol_type = other RNA
gccatttatcccctgtgtaa

SEQ ID NO: 9610 - RNA, 20 nt, synthetic construct
  source 1..20: mol_type = other RNA
gcccaaccccctcatgtttt

SEQ ID NO: 9611 - RNA, 20 nt, synthetic construct
  source 1..20: mol_type = other RNA
gcccacgctggagtgcactg

SEQ ID NO: 9612 - RNA, 20 nt, synthetic construct
  source 1..20: mol_type = other RNA
gcccagtttgctctggagaa

SEQ ID NO: 9613 - RNA, 20 nt, synthetic construct
  source 1..20: mol_type = other RNA
gcccatgccgcccagtttgc

SEQ ID NO: 9614 - RNA, 20 nt, synthetic construct
  source 1..20: mol_type = other RNA
gccccacatagacccagagg

SEQ ID NO: 9615 - RNA, 20 nt, synthetic construct
  source 1..20: mol_type = other RNA
gccccacggcgggccaccaa

SEQ ID NO: 9616 - RNA, 20 nt, synthetic construct
  source 1..20: mol_type = other RNA
gccccgcgaaagagcggaag

SEQ ID NO: 9617 - RNA, 20 nt, synthetic construct
  source 1..20: mol_type = other RNA
gcccctccacgcgttcacaa

SEQ ID NO: 9618 - RNA, 20 nt, synthetic construct
  source 1..20: mol_type = other RNA
gcccctttcggcggggagca

SEQ ID NO: 9619 - RNA, 20 nt, synthetic construct
  source 1..20: mol_type = other RNA
gcccgccgtggggctagtcc

SEQ ID NO: 9620 - RNA, 20 nt, synthetic construct
  source 1..20: mol_type = other RNA
gcccgctaagttcgcatgtc

SEQ ID NO: 9621 - RNA, 20 nt, synthetic construct
  source 1..20: mol_type = other RNA
gcccgggtaagcctgtctgc

SEQ ID NO: 9622 - RNA, 20 nt, synthetic construct
  source 1..20: mol_type = other RNA
gccctaaactttgtcccgac

SEQ ID NO: 9623 - RNA, 20 nt, synthetic construct
  source 1..20: mol_type = other RNA
gccctcgctgtgctctctcg

SEQ ID NO: 9624 - RNA, 20 nt, synthetic construct
  source 1..20: mol_type = other RNA
gccctctgtacgaaaagacc

SEQ ID NO: 9625 - RNA, 20 nt, synthetic construct
  source 1..20: mol_type = other RNA
gccctggactagccccacgg

SEQ ID NO: 9626 - RNA, 20 nt, synthetic construct
  source 1..20: mol_type = other RNA
gccctggttaggcttgactt

SEQ ID NO: 9627 - RNA, 20 nt, synthetic construct
  source 1..20: mol_type = other RNA
gccctgtggtcttttcgtac

SEQ ID NO: 9628 - RNA, 20 nt, synthetic construct
  source 1..20: mol_type = other RNA
gccgaaaggggcaagtagcg

SEQ ID NO: 9629 - RNA, 20 nt, synthetic construct
  source 1..20: mol_type = other RNA
gccgaggcgggaggatggct

SEQ ID NO: 9630 - RNA, 20 nt, synthetic construct
  source 1..20: mol_type = other RNA
gccgaggttgggggagggtt

SEQ ID NO: 9631 - RNA, 20 nt, synthetic construct
  source 1..20: mol_type = other RNA
gccgcagcagacaggcttac

SEQ ID NO: 9632 - RNA, 20 nt, synthetic construct
  source 1..20: mol_type = other RNA
gccgcccagtttgctctgga

SEQ ID NO: 9633 - RNA, 20 nt, synthetic construct
  source 1..20: mol_type = other RNA
gccgcgcctttgggacgagc

SEQ ID NO: 9634 - RNA, 20 nt, synthetic construct
  source 1..20: mol_type = other RNA
gccgcttccccgagatccag

SEQ ID NO: 9635 - RNA, 20 nt, synthetic construct
  source 1..20: mol_type = other RNA
gccgggtgtggtggctcgtg

SEQ ID NO: 9636 - RNA, 20 nt, synthetic construct
  source 1..20: mol_type = other RNA
gccgtaggccaaaggtctcc

SEQ ID NO: 9637 - RNA, 20 nt, synthetic construct
  source 1..20: mol_type = other RNA
gccgtggggctagtccaggg

SEQ ID NO: 9638 - RNA, 20 nt, synthetic construct
  source 1..20: mol_type = other RNA
gcctaaccagggcttttgcg

SEQ ID NO: 9639 - RNA, 20 nt, synthetic construct
  source 1..20: mol_type = other RNA
gcctaagctcaagagatcct

SEQ ID NO: 9640 - RNA, 20 nt, synthetic construct
  source 1..20: mol_type = other RNA
gcctacccgtcccccactcc

SEQ ID NO: 9641 - RNA, 20 nt, synthetic construct
  source 1..20: mol_type = other RNA
gcctacggcgacgggagggt

SEQ ID NO: 9642 - RNA, 20 nt, synthetic construct
  source 1..20: mol_type = other RNA
gcctagacgaagtccacagc

SEQ ID NO: 9643 - RNA, 20 nt, synthetic construct
  source 1..20: mol_type = other RNA
gcctcagccaccggagcagc

SEQ ID NO: 9644 - RNA, 20 nt, synthetic construct
  source 1..20: mol_type = other RNA
gcctcccccagaccccaagc

SEQ ID NO: 9645 - RNA, 20 nt, synthetic construct
  source 1..20: mol_type = other RNA
gcctctcacagatgaagaaa

SEQ ID NO: 9646 - RNA, 20 nt, synthetic construct
  source 1..20: mol_type = other RNA
gcctctggctcccccagcgc

SEQ ID NO: 9647 - RNA, 20 nt, synthetic construct
  source 1..20: mol_type = other RNA
gcctcttactttcggttttg

SEQ ID NO: 9648 - RNA, 20 nt, synthetic construct
  source 1..20: mol_type = other RNA
gcctgccttctgcgtgagat

SEQ ID NO: 9649 - RNA, 20 nt, synthetic construct
  source 1..20: mol_type = other RNA
gcctgggagtggggaagggg

SEQ ID NO: 9650 - RNA, 20 nt, synthetic construct
  source 1..20: mol_type = other RNA
gcctggtctctacaaaaaat

SEQ ID NO: 9651 - RNA, 20 nt, synthetic construct
  source 1..20: mol_type = other RNA
gcctggttgtttccaagatg

SEQ ID NO: 9652 - RNA, 20 nt, synthetic construct
  source 1..20: mol_type = other RNA
gcctgtctgctgcggctctg

SEQ ID NO: 9653 - RNA, 20 nt, synthetic construct
  source 1..20: mol_type = other RNA
gcctgtggtcccagctgctc

SEQ ID NO: 9654 - RNA, 20 nt, synthetic construct
  source 1..20: mol_type = other RNA
gccttagtttcttcatctgt

SEQ ID NO: 9655 - RNA, 20 nt, synthetic construct
  source 1..20: mol_type = other RNA
gccttctgcgtgagattctc

SEQ ID NO: 9656 - RNA, 20 nt, synthetic construct
  source 1..20: mol_type = other RNA
gcctttgggacgagcctacc

SEQ ID NO: 9657 - RNA, 20 nt, synthetic construct
  source 1..20: mol_type = other RNA
gccttttggctgtaattcgt

SEQ ID NO: 9658 - RNA, 20 nt, synthetic construct
  source 1..20: mol_type = other RNA
gcgaaagagcggaagagaaa

SEQ ID NO: 9659 - RNA, 20 nt, synthetic construct
  source 1..20: mol_type = other RNA
gcgaacttagcgggcgccta

SEQ ID NO: 9660 - RNA, 20 nt, synthetic construct
  source 1..20: mol_type = other RNA
gcgacgcctcccccagaccc

SEQ ID NO: 9661 - RNA, 20 nt, synthetic construct
  source 1..20: mol_type = other RNA
gcgacgggagggtcgggaca

SEQ ID NO: 9662 - RNA, 20 nt, synthetic construct
  source 1..20: mol_type = other RNA
gcgacgtttgtagaatgctt

SEQ ID NO: 9663 - RNA, 20 nt, synthetic construct
  source 1..20: mol_type = other RNA
gcgagagagcacagcgaggg

SEQ ID NO: 9664 - RNA, 20 nt, synthetic construct
  source 1..20: mol_type = other RNA
gcgagggccacagagggtgc

SEQ ID NO: 9665 - RNA, 20 nt, synthetic construct
  source 1..20: mol_type = other RNA
gcgcacccccttccccactc

SEQ ID NO: 9666 - RNA, 20 nt, synthetic construct
  source 1..20: mol_type = other RNA
gcgcagctggagtgggggac

SEQ ID NO: 9667 - RNA, 20 nt, synthetic construct
  source 1..20: mol_type = other RNA
gcgcatgccttttggctgta

SEQ ID NO: 9668 - RNA, 20 nt, synthetic construct
  source 1..20: mol_type = other RNA
gcgccagtgcactccagcgt

SEQ ID NO: 9669 - RNA, 20 nt, synthetic construct
  source 1..20: mol_type = other RNA
gcgccatgatagctcaaaag

SEQ ID NO: 9670 - RNA, 20 nt, synthetic construct
  source 1..20: mol_type = other RNA
gcgcccctccacgcgttcac

SEQ ID NO: 9671 - RNA, 20 nt, synthetic construct
  source 1..20: mol_type = other RNA
gcgcccgctaagttcgcatg

SEQ ID NO: 9672 - RNA, 20 nt, synthetic construct
  source 1..20: mol_type = other RNA
gcgccgaggttgggggaggg

SEQ ID NO: 9673 - RNA, 20 nt, synthetic construct
  source 1..20: mol_type = other RNA
gcgccgcgcctttgggacga

SEQ ID NO: 9674 - RNA, 20 nt, synthetic construct
  source 1..20: mol_type = other RNA
gcgcctagacgaagtccaca

SEQ ID NO: 9675 - RNA, 20 nt, synthetic construct
  source 1..20: mol_type = other RNA
gcgcctttgggacgagccta

SEQ ID NO: 9676 - RNA, 20 nt, synthetic construct
  source 1..20: mol_type = other RNA
gcgcgctacttgcccctttc

SEQ ID NO: 9677 - RNA, 20 nt, synthetic construct
  source 1..20: mol_type = other RNA
gcgcggcgctgaggtttgtg

SEQ ID NO: 9678 - RNA, 20 nt, synthetic construct
  source 1..20: mol_type = other RNA
gcgctacttgcccctttcgg

SEQ ID NO: 9679 - RNA, 20 nt, synthetic construct
  source 1..20: mol_type = other RNA
gcgctcccgcaaaagccctg

SEQ ID NO: 9680 - RNA, 20 nt, synthetic construct
  source 1..20: mol_type = other RNA
gcgctctgacgcttatcgac

SEQ ID NO: 9681 - RNA, 20 nt, synthetic construct
  source 1..20: mol_type = other RNA
gcgctgaggtttgtgaacgc

SEQ ID NO: 9682 - RNA, 20 nt, synthetic construct
  source 1..20: mol_type = other RNA
gcgctgggggagccagaggc

SEQ ID NO: 9683 - RNA, 20 nt, synthetic construct
  source 1..20: mol_type = other RNA
gcgcttggggtctgggggag

SEQ ID NO: 9684 - RNA, 20 nt, synthetic construct
  source 1..20: mol_type = other RNA
gcggaagagaaaccctcccc

SEQ ID NO: 9685 - RNA, 20 nt, synthetic construct
  source 1..20: mol_type = other RNA
gcggaagataactgttttca

SEQ ID NO: 9686 - RNA, 20 nt, synthetic construct
  source 1..20: mol_type = other RNA
gcggcatgggccctgtggtc

SEQ ID NO: 9687 - RNA, 20 nt, synthetic construct
  source 1..20: mol_type = other RNA
gcggcgctgaggtttgtgaa

SEQ ID NO: 9688 - RNA, 20 nt, synthetic construct
  source 1..20: mol_type = other RNA
gcggctctgcttcccttaga

SEQ ID NO: 9689 - RNA, 20 nt, synthetic construct
  source 1..20: mol_type = other RNA
gcgggagaggaaggaccaga

SEQ ID NO: 9690 - RNA, 20 nt, synthetic construct
  source 1..20: mol_type = other RNA
gcgggagcgcatgccttttg

SEQ ID NO: 9691 - RNA, 20 nt, synthetic construct
  source 1..20: mol_type = other RNA
gcgggaggatctcttgagct

SEQ ID NO: 9692 - RNA, 20 nt, synthetic construct
  source 1..20: mol_type = other RNA
gcgggaggatggcttgaggt

SEQ ID NO: 9693 - RNA, 20 nt, synthetic construct
  source 1..20: mol_type = other RNA
gcgggccaccaaggagaact

SEQ ID NO: 9694 - RNA, 20 nt, synthetic construct
  source 1..20: mol_type = other RNA
gcgggcgcctagacgaagtc

SEQ ID NO: 9695 - RNA, 20 nt, synthetic construct
  source 1..20: mol_type = other RNA
gcggggagcaggggagacct

SEQ ID NO: 9696 - RNA, 20 nt, synthetic construct
  source 1..20: mol_type = other RNA
gcggggtggcctgggagtgg

SEQ ID NO: 9697 - RNA, 20 nt, synthetic construct
  source 1..20: mol_type = other RNA
gcggtttcgaataattaact

SEQ ID NO: 9698 - RNA, 20 nt, synthetic construct
  source 1..20: mol_type = other RNA
gcgtaagctaccacgcccaa

SEQ ID NO: 9699 - RNA, 20 nt, synthetic construct
  source 1..20: mol_type = other RNA
gcgtcagagcgccgaggttg

SEQ ID NO: 9700 - RNA, 20 nt, synthetic construct
  source 1..20: mol_type = other RNA
gcgtcatttaattttgaaaa

SEQ ID NO: 9701 - RNA, 20 nt, synthetic construct
  source 1..20: mol_type = other RNA
gcgtcgataagcgtcagagc

SEQ ID NO: 9702 - RNA, 20 nt, synthetic construct
  source 1..20: mol_type = other RNA
gcgtcgcccgggtaagcctg

SEQ ID NO: 9703 - RNA, 20 nt, synthetic construct
  source 1..20: mol_type = other RNA
gcgtgagattctccagagca

SEQ ID NO: 9704 - RNA, 20 nt, synthetic construct
  source 1..20: mol_type = other RNA
gcgtgctgtttcctccccac

SEQ ID NO: 9705 - RNA, 20 nt, synthetic construct
  source 1..20: mol_type = other RNA
gcgtggaggggcgcttgggg

SEQ ID NO: 9706 - RNA, 20 nt, synthetic construct
  source 1..20: mol_type = other RNA
gcgttcacaaacctcagcgc

SEQ ID NO: 9707 - RNA, 20 nt, synthetic construct
  source 1..20: mol_type = other RNA
gctaagttcgcatgtcctag

SEQ ID NO: 9708 - RNA, 20 nt, synthetic construct
  source 1..20: mol_type = other RNA
gctaccacgcccaaccccct

SEQ ID NO: 9709 - RNA, 20 nt, synthetic construct
  source 1..20: mol_type = other RNA
gctacttgcccctttcggcg

SEQ ID NO: 9710 - RNA, 20 nt, synthetic construct
  source 1..20: mol_type = other RNA
gctaggacatgcgaacttag

SEQ ID NO: 9711 - RNA, 20 nt, synthetic construct
  source 1..20: mol_type = other RNA
gctagtccagggctggatct

SEQ ID NO: 9712 - RNA, 20 nt, synthetic construct
  source 1..20: mol_type = other RNA
gctatcatggcgccagtgca

SEQ ID NO: 9713 - RNA, 20 nt, synthetic construct
  source 1..20: mol_type = other RNA
gctcaaaagcctaagctcaa

SEQ ID NO: 9714 - RNA, 20 nt, synthetic construct
  source 1..20: mol_type = other RNA
gctcccccagcgcagctgga

SEQ ID NO: 9715 - RNA, 20 nt, synthetic construct
  source 1..20: mol_type = other RNA
gctccccgccgaaaggggca

SEQ ID NO: 9716 - RNA, 20 nt, synthetic construct
  source 1..20: mol_type = other RNA
gctcccgcaaaagccctggt

SEQ ID NO: 9717 - RNA, 20 nt, synthetic construct
  source 1..20: mol_type = other RNA
gctccggtggctgaggcggg

SEQ ID NO: 9718 - RNA, 20 nt, synthetic construct
  source 1..20: mol_type = other RNA
gctccgtgacttcccttctc

SEQ ID NO: 9719 - RNA, 20 nt, synthetic construct
  source 1..20: mol_type = other RNA
gctcgtcccaaaggcgcggc

SEQ ID NO: 9720 - RNA, 20 nt, synthetic construct
  source 1..20: mol_type = other RNA
gctcgtgcctgtggtcccag

SEQ ID NO: 9721 - RNA, 20 nt, synthetic construct
  source 1..20: mol_type = other RNA
gctctccagtctaagggaag

SEQ ID NO: 9722 - RNA, 20 nt, synthetic construct
  source 1..20: mol_type = other RNA
gctctctcgctccgtgactt

SEQ ID NO: 9723 - RNA, 20 nt, synthetic construct
  source 1..20: mol_type = other RNA
gctctgacgcttatcgacgc

SEQ ID NO: 9724 - RNA, 20 nt, synthetic construct
  source 1..20: mol_type = other RNA
gctctgcaccctctgtggcc

SEQ ID NO: 9725 - RNA, 20 nt, synthetic construct
  source 1..20: mol_type = other RNA
gctctgcttcccttagactg

SEQ ID NO: 9726 - RNA, 20 nt, synthetic construct
  source 1..20: mol_type = other RNA
gctctggagaatctcacgca

SEQ ID NO: 9727 - RNA, 20 nt, synthetic construct
  source 1..20: mol_type = other RNA
gctctggtccttcctctccc

SEQ ID NO: 9728 - RNA, 20 nt, synthetic construct
  source 1..20: mol_type = other RNA
gctctgttgcccacgctgga

SEQ ID NO: 9729 - RNA, 20 nt, synthetic construct
  source 1..20: mol_type = other RNA
gctctttcgcggggcctctg

SEQ ID NO: 9730 - RNA, 20 nt, synthetic construct
  source 1..20: mol_type = other RNA
gctctttgcctggttgtttc

SEQ ID NO: 9731 - RNA, 20 nt, synthetic construct
  source 1..20: mol_type = other RNA
gctgaggtttgtgaacgcgt

SEQ ID NO: 9732 - RNA, 20 nt, synthetic construct
  source 1..20: mol_type = other RNA
gctgccatttatcccctgtg

SEQ ID NO: 9733 - RNA, 20 nt, synthetic construct
  source 1..20: mol_type = other RNA
gctgcgctgggggagccaga

SEQ ID NO: 9734 - RNA, 20 nt, synthetic construct
  source 1..20: mol_type = other RNA
gctgcggctctgcttccctt

SEQ ID NO: 9735 - RNA, 20 nt, synthetic construct
  source 1..20: mol_type = other RNA
gctgctccggtggctgaggc

SEQ ID NO: 9736 - RNA, 20 nt, synthetic construct
  source 1..20: mol_type = other RNA
gctggagtgcactggcgcca

SEQ ID NO: 9737 - RNA, 20 nt, synthetic construct
  source 1..20: mol_type = other RNA
gctggagtgggggacgggta

SEQ ID NO: 9738 - RNA, 20 nt, synthetic construct
  source 1..20: mol_type = other RNA
gctggatctcggggaagcgg

SEQ ID NO: 9739 - RNA, 20 nt, synthetic construct
  source 1..20: mol_type = other RNA
gctgggggagccagaggccc

SEQ ID NO: 9740 - RNA, 20 nt, synthetic construct
  source 1..20: mol_type = other RNA
gctggtctcaactacggacc

SEQ ID NO: 9741 - RNA, 20 nt, synthetic construct
  source 1..20: mol_type = other RNA
gctgtaattcgtgcattttt

SEQ ID NO: 9742 - RNA, 20 nt, synthetic construct
  source 1..20: mol_type = other RNA
gctgtgatacaaagcggttt

SEQ ID NO: 9743 - RNA, 20 nt, synthetic construct
  source 1..20: mol_type = other RNA
gctgtgctctctcgctccgt

SEQ ID NO: 9744 - RNA, 20 nt, synthetic construct
  source 1..20: mol_type = other RNA
gctgtggacttcgtctaggc

SEQ ID NO: 9745 - RNA, 20 nt, synthetic construct
  source 1..20: mol_type = other RNA
gctgtttcctccccacggtg

SEQ ID NO: 9746 - RNA, 20 nt, synthetic construct
  source 1..20: mol_type = other RNA
gcttacccgggcgacgcctc

SEQ ID NO: 9747 - RNA, 20 nt, synthetic construct
  source 1..20: mol_type = other RNA
gcttaggcttttgagctatc

SEQ ID NO: 9748 - RNA, 20 nt, synthetic construct
  source 1..20: mol_type = other RNA
gcttatcgacgccctaaact

SEQ ID NO: 9749 - RNA, 20 nt, synthetic construct
  source 1..20: mol_type = other RNA
gcttccccgagatccagccc

SEQ ID NO: 9750 - RNA, 20 nt, synthetic construct
  source 1..20: mol_type = other RNA
gcttcccttagactggagag

SEQ ID NO: 9751 - RNA, 20 nt, synthetic construct
  source 1..20: mol_type = other RNA
gcttcctctttggctctttg

SEQ ID NO: 9752 - RNA, 20 nt, synthetic construct
  source 1..20: mol_type = other RNA
gcttgacttcaatctcgatt

SEQ ID NO: 9753 - RNA, 20 nt, synthetic construct
  source 1..20: mol_type = other RNA
gcttgaggtccgtagttgag

SEQ ID NO: 9754 - RNA, 20 nt, synthetic construct
  source 1..20: mol_type = other RNA
gcttggctgtgatacaaagc

SEQ ID NO: 9755 - RNA, 20 nt, synthetic construct
  source 1..20: mol_type = other RNA
gcttggggtctgggggaggc

SEQ ID NO: 9756 - RNA, 20 nt, synthetic construct
  source 1..20: mol_type = other RNA
gctttgcgtcatttaatttt

SEQ ID NO: 9757 - RNA, 20 nt, synthetic construct
  source 1..20: mol_type = other RNA
gctttgtatcacagccaagc

SEQ ID NO: 9758 - RNA, 20 nt, synthetic construct
  source 1..20: mol_type = other RNA
gcttttgagctatcatggcg

SEQ ID NO: 9759 - RNA, 20 nt, synthetic construct
  source 1..20: mol_type = other RNA
gcttttgcgggagcgcatgc

SEQ ID NO: 9760 - RNA, 20 nt, synthetic construct
  source 1..20: mol_type = other RNA
ggaaacaaccaggcaaagag

SEQ ID NO: 9761 - RNA, 20 nt, synthetic construct
  source 1..20: mol_type = other RNA
ggaaacagcacgcgacgttt

SEQ ID NO: 9762 - RNA, 20 nt, synthetic construct
  source 1..20: mol_type = other RNA
ggaagagaaaccctccccca

SEQ ID NO: 9763 - RNA, 20 nt, synthetic construct
  source 1..20: mol_type = other RNA
ggaagataactgttttcaaa

SEQ ID NO: 9764 - RNA, 20 nt, synthetic construct
  source 1..20: mol_type = other RNA
ggaagcagagccgcagcaga

SEQ ID NO: 9765 - RNA, 20 nt, synthetic construct
  source 1..20: mol_type = other RNA
ggaagccctctgtacgaaaa

SEQ ID NO: 9766 - RNA, 20 nt, synthetic construct
  source 1..20: mol_type = other RNA
ggaagcggcggggtggcctg

SEQ ID NO: 9767 - RNA, 20 nt, synthetic construct
  source 1..20: mol_type = other RNA
ggaaggaccagagcgggagg

SEQ ID NO: 9768 - RNA, 20 nt, synthetic construct
  source 1..20: mol_type = other RNA
ggaagggggtgcgcacccgg

SEQ ID NO: 9769 - RNA, 20 nt, synthetic construct
  source 1..20: mol_type = other RNA
ggaagtcacggagcgagaga

SEQ ID NO: 9770 - RNA, 20 nt, synthetic construct
  source 1..20: mol_type = other RNA
ggacaaagtttagggcgtcg

SEQ ID NO: 9771 - RNA, 20 nt, synthetic construct
  source 1..20: mol_type = other RNA
ggacatgcgaacttagcggg

SEQ ID NO: 9772 - RNA, 20 nt, synthetic construct
  source 1..20: mol_type = other RNA
ggaccacaggcacgagccac

SEQ ID NO: 9773 - RNA, 20 nt, synthetic construct
  source 1..20: mol_type = other RNA
ggaccagagcgggagggtag

SEQ ID NO: 9774 - RNA, 20 nt, synthetic construct
  source 1..20: mol_type = other RNA
ggacctcaagccatcctccc

SEQ ID NO: 9775 - RNA, 20 nt, synthetic construct
  source 1..20: mol_type = other RNA
ggacgagcctacccgtcccc

SEQ ID NO: 9776 - RNA, 20 nt, synthetic construct
  source 1..20: mol_type = other RNA
ggacgcgcgctacttgcccc

SEQ ID NO: 9777 - RNA, 20 nt, synthetic construct
  source 1..20: mol_type = other RNA
ggacgggtaggctcgtccca

SEQ ID NO: 9778 - RNA, 20 nt, synthetic construct
  source 1..20: mol_type = other RNA
ggactagccccacggcgggc

SEQ ID NO: 9779 - RNA, 20 nt, synthetic construct
  source 1..20: mol_type = other RNA
ggacttcgtctaggcgcccg

SEQ ID NO: 9780 - RNA, 20 nt, synthetic construct
  source 1..20: mol_type = other RNA
ggactttatgtgctttgcgt

SEQ ID NO: 9781 - RNA, 20 nt, synthetic construct
  source 1..20: mol_type = other RNA
ggagaacttggagaagggaa

SEQ ID NO: 9782 - RNA, 20 nt, synthetic construct
  source 1..20: mol_type = other RNA
ggagaagggaagtcacggag

SEQ ID NO: 9783 - RNA, 20 nt, synthetic construct
  source 1..20: mol_type = other RNA
ggagaatctcacgcagaagg

SEQ ID NO: 9784 - RNA, 20 nt, synthetic construct
  source 1..20: mol_type = other RNA
ggagacctttggcctacggc

SEQ ID NO: 9785 - RNA, 20 nt, synthetic construct
  source 1..20: mol_type = other RNA
ggagagctgtggacttcgtc

SEQ ID NO: 9786 - RNA, 20 nt, synthetic construct
  source 1..20: mol_type = other RNA
ggagaggaaggaccagagcg

SEQ ID NO: 9787 - RNA, 20 nt, synthetic construct
  source 1..20: mol_type = other RNA
ggagcagctgggaccacagg

SEQ ID NO: 9788 - RNA, 20 nt, synthetic construct
  source 1..20: mol_type = other RNA
ggagcaggggagacctttgg

SEQ ID NO: 9789 - RNA, 20 nt, synthetic construct
  source 1..20: mol_type = other RNA
ggagccagaggccccgcgaa

SEQ ID NO: 9790 - RNA, 20 nt, synthetic construct
  source 1..20: mol_type = other RNA
ggagcgagagagcacagcga

SEQ ID NO: 9791 - RNA, 20 nt, synthetic construct
  source 1..20: mol_type = other RNA
ggagcgcatgccttttggct

SEQ ID NO: 9792 - RNA, 20 nt, synthetic construct
  source 1..20: mol_type = other RNA
ggaggaaacagcacgcgacg

SEQ ID NO: 9793 - RNA, 20 nt, synthetic construct
  source 1..20: mol_type = other RNA
ggaggatctcttgagcttag

SEQ ID NO: 9794 - RNA, 20 nt, synthetic construct
  source 1..20: mol_type = other RNA
ggaggatggcttgaggtccg

SEQ ID NO: 9795 - RNA, 20 nt, synthetic construct
  source 1..20: mol_type = other RNA
ggaggcgtcgcccgggtaag

SEQ ID NO: 9796 - RNA, 20 nt, synthetic construct
  source 1..20: mol_type = other RNA
ggaggggcgcttggggtctg

SEQ ID NO: 9797 - RNA, 20 nt, synthetic construct
  source 1..20: mol_type = other RNA
ggagggtcgggacaaagttt

SEQ ID NO: 9798 - RNA, 20 nt, synthetic construct
  source 1..20: mol_type = other RNA
ggagggtttctcttccgctc

SEQ ID NO: 9799 - RNA, 20 nt, synthetic construct
  source 1..20: mol_type = other RNA
ggagtgcactggcgccatga

SEQ ID NO: 9800 - RNA, 20 nt, synthetic construct
  source 1..20: mol_type = other RNA
ggagtggggaagggggtgcg

SEQ ID NO: 9801 - RNA, 20 nt, synthetic construct
  source 1..20: mol_type = other RNA
ggagtgggggacgggtaggc

SEQ ID NO: 9802 - RNA, 20 nt, synthetic construct
  source 1..20: mol_type = other RNA
ggataaatggcagcaatcga

SEQ ID NO: 9803 - RNA, 20 nt, synthetic construct
  source 1..20: mol_type = other RNA
ggatctcggggaagcggcgg

SEQ ID NO: 9804 - RNA, 20 nt, synthetic construct
  source 1..20: mol_type = other RNA
ggatctcttgagcttaggct

SEQ ID NO: 9805 - RNA, 20 nt, synthetic construct
  source 1..20: mol_type = other RNA
ggatggcttgaggtccgtag

SEQ ID NO: 9806 - RNA, 20 nt, synthetic construct
  source 1..20: mol_type = other RNA
ggcaaagagccaaagaggaa

SEQ ID NO: 9807 - RNA, 20 nt, synthetic construct
  source 1..20: mol_type = other RNA
ggcaagtagcgcgcgtcccg

SEQ ID NO: 9808 - RNA, 20 nt, synthetic construct
  source 1..20: mol_type = other RNA
ggcacacagaaagatgtcaa

SEQ ID NO: 9809 - RNA, 20 nt, synthetic construct
  source 1..20: mol_type = other RNA
ggcacagtacatcttggaaa

SEQ ID NO: 9810 - RNA, 20 nt, synthetic construct
  source 1..20: mol_type = other RNA
ggcaccgagattttaagaaa

SEQ ID NO: 9811 - RNA, 20 nt, synthetic construct
  source 1..20: mol_type = other RNA
ggcagaagataaccatagta

SEQ ID NO: 9812 - RNA, 20 nt, synthetic construct
  source 1..20: mol_type = other RNA
ggcagcaatcgagattgaag

SEQ ID NO: 9813 - RNA, 20 nt, synthetic construct
  source 1..20: mol_type = other RNA
ggcaggcgtttttcttaaaa

SEQ ID NO: 9814 - RNA, 20 nt, synthetic construct
  source 1..20: mol_type = other RNA
ggcatgcgctcccgcaaaag

SEQ ID NO: 9815 - RNA, 20 nt, synthetic construct
  source 1..20: mol_type = other RNA
ggcatgggccctgtggtctt

SEQ ID NO: 9816 - RNA, 20 nt, synthetic construct
  source 1..20: mol_type = other RNA
ggccaaaggtctcccctgct

SEQ ID NO: 9817 - RNA, 20 nt, synthetic construct
  source 1..20: mol_type = other RNA
ggccacaccgtggggaggaa

SEQ ID NO: 9818 - RNA, 20 nt, synthetic construct
  source 1..20: mol_type = other RNA
ggccacagagggtgcagagc

SEQ ID NO: 9819 - RNA, 20 nt, synthetic construct
  source 1..20: mol_type = other RNA
ggccaccaaggagaacttgg

SEQ ID NO: 9820 - RNA, 20 nt, synthetic construct
  source 1..20: mol_type = other RNA
ggccaggctggtctcaacta

SEQ ID NO: 9821 - RNA, 20 nt, synthetic construct
  source 1..20: mol_type = other RNA
ggcccatgccgcccagtttg

SEQ ID NO: 9822 - RNA, 20 nt, synthetic construct
  source 1..20: mol_type = other RNA
ggccccacatagacccagag

SEQ ID NO: 9823 - RNA, 20 nt, synthetic construct
  source 1..20: mol_type = other RNA
ggccccgcgaaagagcggaa

SEQ ID NO: 9824 - RNA, 20 nt, synthetic construct
  source 1..20: mol_type = other RNA
ggcccgccgtggggctagtc

SEQ ID NO: 9825 - RNA, 20 nt, synthetic construct
  source 1..20: mol_type = other RNA
ggccctcgctgtgctctctc

SEQ ID NO: 9826 - RNA, 20 nt, synthetic construct
  source 1..20: mol_type = other RNA
ggccctgtggtcttttcgta

SEQ ID NO: 9827 - RNA, 20 nt, synthetic construct
  source 1..20: mol_type = other RNA
ggccgaggcgggaggatggc

SEQ ID NO: 9828 - RNA, 20 nt, synthetic construct
  source 1..20: mol_type = other RNA
ggcctacggcgacgggaggg

SEQ ID NO: 9829 - RNA, 20 nt, synthetic construct
  source 1..20: mol_type = other RNA
ggcctctggctcccccagcg

SEQ ID NO: 9830 - RNA, 20 nt, synthetic construct
  source 1..20: mol_type = other RNA
ggcctgggagtggggaaggg

SEQ ID NO: 9831 - RNA, 20 nt, synthetic construct
  source 1..20: mol_type = other RNA
ggcgacgcctcccccagacc

SEQ ID NO: 9832 - RNA, 20 nt, synthetic construct
  source 1..20: mol_type = other RNA
ggcgacgggagggtcgggac

SEQ ID NO: 9833 - RNA, 20 nt, synthetic construct
  source 1..20: mol_type = other RNA
ggcgccagtgcactccagcg

SEQ ID NO: 9834 - RNA, 20 nt, synthetic construct
  source 1..20: mol_type = other RNA
ggcgccatgatagctcaaaa

SEQ ID NO: 9835 - RNA, 20 nt, synthetic construct
  source 1..20: mol_type = other RNA
ggcgcccgctaagttcgcat

SEQ ID NO: 9836 - RNA, 20 nt, synthetic construct
  source 1..20: mol_type = other RNA
ggcgcctagacgaagtccac

SEQ ID NO: 9837 - RNA, 20 nt, synthetic construct
  source 1..20: mol_type = other RNA
ggcgcggcgctgaggtttgt

SEQ ID NO: 9838 - RNA, 20 nt, synthetic construct
  source 1..20: mol_type = other RNA
ggcgctctgacgcttatcga

SEQ ID NO: 9839 - RNA, 20 nt, synthetic construct
  source 1..20: mol_type = other RNA
ggcgctgaggtttgtgaacg

SEQ ID NO: 9840 - RNA, 20 nt, synthetic construct
  source 1..20: mol_type = other RNA
ggcgcttggggtctggggga

SEQ ID NO: 9841 - RNA, 20 nt, synthetic construct
  source 1..20: mol_type = other RNA
ggcggaagataactgttttc

SEQ ID NO: 9842 - RNA, 20 nt, synthetic construct
  source 1..20: mol_type = other RNA
ggcggcatgggccctgtggt

SEQ ID NO: 9843 - RNA, 20 nt, synthetic construct
  source 1..20: mol_type = other RNA
ggcgggaggatctcttgagc

SEQ ID NO: 9844 - RNA, 20 nt, synthetic construct
  source 1..20: mol_type = other RNA
ggcgggaggatggcttgagg

SEQ ID NO: 9845 - RNA, 20 nt, synthetic construct
  source 1..20: mol_type = other RNA
ggcgggccaccaaggagaac

SEQ ID NO: 9846 - RNA, 20 nt, synthetic construct
  source 1..20: mol_type = other RNA
ggcggggagcaggggagacc

SEQ ID NO: 9847 - RNA, 20 nt, synthetic construct
  source 1..20: mol_type = other RNA
ggcggggtggcctgggagtg

SEQ ID NO: 9848 - RNA, 20 nt, synthetic construct
  source 1..20: mol_type = other RNA
ggcgtaagctaccacgccca

SEQ ID NO: 9849 - RNA, 20 nt, synthetic construct
  source 1..20: mol_type = other RNA
ggcgtcgataagcgtcagag

SEQ ID NO: 9850 - RNA, 20 nt, synthetic construct
  source 1..20: mol_type = other RNA
ggcgtcgcccgggtaagcct

SEQ ID NO: 9851 - RNA, 20 nt, synthetic construct
  source 1..20: mol_type = other RNA
ggctagtccagggctggatc

SEQ ID NO: 9852 - RNA, 20 nt, synthetic construct
  source 1..20: mol_type = other RNA
ggctcccccagcgcagctgg

SEQ ID NO: 9853 - RNA, 20 nt, synthetic construct
  source 1..20: mol_type = other RNA
ggctcgtcccaaaggcgcgg

SEQ ID NO: 9854 - RNA, 20 nt, synthetic construct
  source 1..20: mol_type = other RNA
ggctcgtgcctgtggtccca

SEQ ID NO: 9855 - RNA, 20 nt, synthetic construct
  source 1..20: mol_type = other RNA
ggctctgcttcccttagact

SEQ ID NO: 9856 - RNA, 20 nt, synthetic construct
  source 1..20: mol_type = other RNA
ggctctttgcctggttgttt

SEQ ID NO: 9857 - RNA, 20 nt, synthetic construct
  source 1..20: mol_type = other RNA
ggctggatctcggggaagcg

SEQ ID NO: 9858 - RNA, 20 nt, synthetic construct
  source 1..20: mol_type = other RNA
ggctggtctcaactacggac

SEQ ID NO: 9859 - RNA, 20 nt, synthetic construct
  source 1..20: mol_type = other RNA
ggctgtaattcgtgcatttt

SEQ ID NO: 9860 - RNA, 20 nt, synthetic construct
  source 1..20: mol_type = other RNA
ggctgtgatacaaagcggtt

SEQ ID NO: 9861 - RNA, 20 nt, synthetic construct
  source 1..20: mol_type = other RNA
ggcttacccgggcgacgcct

SEQ ID NO: 9862 - RNA, 20 nt, synthetic construct
  source 1..20: mol_type = other RNA
ggcttcctctttggctcttt

SEQ ID NO: 9863 - RNA, 20 nt, synthetic construct
  source 1..20: mol_type = other RNA
ggcttgacttcaatctcgat

SEQ ID NO: 9864 - RNA, 20 nt, synthetic construct
  source 1..20: mol_type = other RNA
ggcttgaggtccgtagttga

SEQ ID NO: 9865 - RNA, 20 nt, synthetic construct
  source 1..20: mol_type = other RNA
ggcttttgagctatcatggc

SEQ ID NO: 9866 - RNA, 20 nt, synthetic construct
  source 1..20: mol_type = other RNA
ggcttttgcgggagcgcatg

SEQ ID NO: 9867 - RNA, 20 nt, synthetic construct
  source 1..20: mol_type = other RNA
gggaacaaataagttaatta

SEQ ID NO: 9868 - RNA, 20 nt, synthetic construct
  source 1..20: mol_type = other RNA
gggaagcagagccgcagcag

SEQ ID NO: 9869 - RNA, 20 nt, synthetic construct
  source 1..20: mol_type = other RNA
gggaagcggcggggtggcct

SEQ ID NO: 9870 - RNA, 20 nt, synthetic construct
  source 1..20: mol_type = other RNA
gggaagggggtgcgcacccg

SEQ ID NO: 9871 - RNA, 20 nt, synthetic construct
  source 1..20: mol_type = other RNA
gggaagtcacggagcgagag

SEQ ID NO: 9872 - RNA, 20 nt, synthetic construct
  source 1..20: mol_type = other RNA
gggacaaagtttagggcgtc

SEQ ID NO: 9873 - RNA, 20 nt, synthetic construct
  source 1..20: mol_type = other RNA
gggacgagcctacccgtccc

SEQ ID NO: 9874 - RNA, 20 nt, synthetic construct
  source 1..20: mol_type = other RNA
gggacgcgcgctacttgccc

SEQ ID NO: 9875 - RNA, 20 nt, synthetic construct
  source 1..20: mol_type = other RNA
gggacgggtaggctcgtccc

SEQ ID NO: 9876 - RNA, 20 nt, synthetic construct
  source 1..20: mol_type = other RNA
gggagacctttggcctacgg

SEQ ID NO: 9877 - RNA, 20 nt, synthetic construct
  source 1..20: mol_type = other RNA
gggagaggaaggaccagagc

SEQ ID NO: 9878 - RNA, 20 nt, synthetic construct
  source 1..20: mol_type = other RNA
gggagcaggggagacctttg

SEQ ID NO: 9879 - RNA, 20 nt, synthetic construct
  source 1..20: mol_type = other RNA
gggagccagaggccccgcga

SEQ ID NO: 9880 - RNA, 20 nt, synthetic construct
  source 1..20: mol_type = other RNA
gggagcgcatgccttttggc

SEQ ID NO: 9881 - RNA, 20 nt, synthetic construct
  source 1..20: mol_type = other RNA
gggaggaaacagcacgcgac

SEQ ID NO: 9882 - RNA, 20 nt, synthetic construct
  source 1..20: mol_type = other RNA
gggaggatctcttgagctta

SEQ ID NO: 9883 - RNA, 20 nt, synthetic construct
  source 1..20: mol_type = other RNA
gggaggatggcttgaggtcc

SEQ ID NO: 9884 - RNA, 20 nt, synthetic construct
  source 1..20: mol_type = other RNA
gggaggcgtcgcccgggtaa

SEQ ID NO: 9885 - RNA, 20 nt, synthetic construct
  source 1..20: mol_type = other RNA
gggagggtcgggacaaagtt

SEQ ID NO: 9886 - RNA, 20 nt, synthetic construct
  source 1..20: mol_type = other RNA
gggagggtttctcttccgct

SEQ ID NO: 9887 - RNA, 20 nt, synthetic construct
  source 1..20: mol_type = other RNA
gggagtggggaagggggtgc

SEQ ID NO: 9888 - RNA, 20 nt, synthetic construct
  source 1..20: mol_type = other RNA
gggataaatggcagcaatcg

SEQ ID NO: 9889 - RNA, 20 nt, synthetic construct
  source 1..20: mol_type = other RNA
gggcaagtagcgcgcgtccc

SEQ ID NO: 9890 - RNA, 20 nt, synthetic construct
  source 1..20: mol_type = other RNA
gggccacaccgtggggagga

SEQ ID NO: 9891 - RNA, 20 nt, synthetic construct
  source 1..20: mol_type = other RNA
gggccacagagggtgcagag

SEQ ID NO: 9892 - RNA, 20 nt, synthetic construct
  source 1..20: mol_type = other RNA
gggccaccaaggagaacttg

SEQ ID NO: 9893 - RNA, 20 nt, synthetic construct
  source 1..20: mol_type = other RNA
gggcccatgccgcccagttt

SEQ ID NO: 9894 - RNA, 20 nt, synthetic construct
  source 1..20: mol_type = other RNA
gggccctgtggtcttttcgt

SEQ ID NO: 9895 - RNA, 20 nt, synthetic construct
  source 1..20: mol_type = other RNA
gggcctctggctcccccagc

SEQ ID NO: 9896 - RNA, 20 nt, synthetic construct
  source 1..20: mol_type = other RNA
gggcgacgcctcccccagac

SEQ ID NO: 9897 - RNA, 20 nt, synthetic construct
  source 1..20: mol_type = other RNA
gggcgcctagacgaagtcca

SEQ ID NO: 9898 - RNA, 20 nt, synthetic construct
  source 1..20: mol_type = other RNA
gggcgcttggggtctggggg

SEQ ID NO: 9899 - RNA, 20 nt, synthetic construct
  source 1..20: mol_type = other RNA
gggcggcatgggccctgtgg

SEQ ID NO: 9900 - RNA, 20 nt, synthetic construct
  source 1..20: mol_type = other RNA
gggcgtcgataagcgtcaga

SEQ ID NO: 9901 - RNA, 20 nt, synthetic construct
  source 1..20: mol_type = other RNA
gggctagtccagggctggat

SEQ ID NO: 9902 - RNA, 20 nt, synthetic construct
  source 1..20: mol_type = other RNA
gggctggatctcggggaagc

SEQ ID NO: 9903 - RNA, 20 nt, synthetic construct
  source 1..20: mol_type = other RNA
gggcttcctctttggctctt

SEQ ID NO: 9904 - RNA, 20 nt, synthetic construct
  source 1..20: mol_type = other RNA
gggcttttgcgggagcgcat

SEQ ID NO: 9905 - RNA, 20 nt, synthetic construct
  source 1..20: mol_type = other RNA
ggggaagggggtgcgcaccc

SEQ ID NO: 9906 - RNA, 20 nt, synthetic construct
  source 1..20: mol_type = other RNA
ggggacgggtaggctcgtcc

SEQ ID NO: 9907 - RNA, 20 nt, synthetic construct
  source 1..20: mol_type = other RNA
ggggagacctttggcctacg

SEQ ID NO: 9908 - RNA, 20 nt, synthetic construct
  source 1..20: mol_type = other RNA
ggggagcaggggagaccttt

SEQ ID NO: 9909 - RNA, 20 nt, synthetic construct
  source 1..20: mol_type = other RNA
ggggaggaaacagcacgcga

SEQ ID NO: 9910 - RNA, 20 nt, synthetic construct
  source 1..20: mol_type = other RNA
ggggaggcgtcgcccgggta

SEQ ID NO: 9911 - RNA, 20 nt, synthetic construct
  source 1..20: mol_type = other RNA
ggggagggtttctcttccgc

SEQ ID NO: 9912 - RNA, 20 nt, synthetic construct
  source 1..20: mol_type = other RNA
ggggataaatggcagcaatc

SEQ ID NO: 9913 - RNA, 20 nt, synthetic construct
  source 1..20: mol_type = other RNA
ggggcaagtagcgcgcgtcc

SEQ ID NO: 9914 - RNA, 20 nt, synthetic construct
  source 1..20: mol_type = other RNA
ggggccacaccgtggggagg

SEQ ID NO: 9915 - RNA, 20 nt, synthetic construct
  source 1..20: mol_type = other RNA
ggggcctctggctcccccag

SEQ ID NO: 9916 - RNA, 20 nt, synthetic construct
  source 1..20: mol_type = other RNA
ggggcgcttggggtctgggg

SEQ ID NO: 9917 - RNA, 20 nt, synthetic construct
  source 1..20: mol_type = other RNA
ggggctagtccagggctgga

SEQ ID NO: 9918 - RNA, 20 nt, synthetic construct
  source 1..20: mol_type = other RNA
gggggacgggtaggctcgtc

SEQ ID NO: 9919 - RNA, 20 nt, synthetic construct
  source 1..20: mol_type = other RNA
gggggagggtttctcttccg

SEQ ID NO: 9920 - RNA, 20 nt, synthetic construct
  source 1..20: mol_type = other RNA
gggggttgggcgtggtagct

SEQ ID NO: 9921 - RNA, 20 nt, synthetic construct
  source 1..20: mol_type = other RNA
ggggtctgggggaggcgtcg

SEQ ID NO: 9922 - RNA, 20 nt, synthetic construct
  source 1..20: mol_type = other RNA
ggggtggcctgggagtgggg

SEQ ID NO: 9923 - RNA, 20 nt, synthetic construct
  source 1..20: mol_type = other RNA
ggggttgggcgtggtagctt

SEQ ID NO: 9924 - RNA, 20 nt, synthetic construct
  source 1..20: mol_type = other RNA
gggtaagcctgtctgctgcg

SEQ ID NO: 9925 - RNA, 20 nt, synthetic construct
  source 1..20: mol_type = other RNA
gggtaggctcgtcccaaagg

SEQ ID NO: 9926 - RNA, 20 nt, synthetic construct
  source 1..20: mol_type = other RNA
gggtagttcttataattttt

SEQ ID NO: 9927 - RNA, 20 nt, synthetic construct
  source 1..20: mol_type = other RNA
gggtcgggacaaagtttagg

SEQ ID NO: 9928 - RNA, 20 nt, synthetic construct
  source 1..20: mol_type = other RNA
gggtctatgtggggccacac

SEQ ID NO: 9929 - RNA, 20 nt, synthetic construct
  source 1..20: mol_type = other RNA
gggtctgggggaggcgtcgc

SEQ ID NO: 9930 - RNA, 20 nt, synthetic construct
  source 1..20: mol_type = other RNA
gggtgcagagcgggagagga

SEQ ID NO: 9931 - RNA, 20 nt, synthetic construct
  source 1..20: mol_type = other RNA
gggtgcgcacccccttcccc

SEQ ID NO: 9932 - RNA, 20 nt, synthetic construct
  source 1..20: mol_type = other RNA
gggtggcctgggagtgggga

SEQ ID NO: 9933 - RNA, 20 nt, synthetic construct
  source 1..20: mol_type = other RNA
gggttgggcgtggtagctta

SEQ ID NO: 9934 - RNA, 20 nt, synthetic construct
  source 1..20: mol_type = other RNA
gggtttctcttccgctcttt

SEQ ID NO: 9935 - RNA, 20 nt, synthetic construct
  source 1..20: mol_type = other RNA
ggtaagcctgtctgctgcgg

SEQ ID NO: 9936 - RNA, 20 nt, synthetic construct
  source 1..20: mol_type = other RNA
ggtaggctcgtcccaaaggc

SEQ ID NO: 9937 - RNA, 20 nt, synthetic construct
  source 1..20: mol_type = other RNA
ggtcccagctgctccggtgg

SEQ ID NO: 9938 - RNA, 20 nt, synthetic construct
  source 1..20: mol_type = other RNA
ggtccgtagttgagaccagc

SEQ ID NO: 9939 - RNA, 20 nt, synthetic construct
  source 1..20: mol_type = other RNA
ggtccttcctctcccgctct

SEQ ID NO: 9940 - RNA, 20 nt, synthetic construct
  source 1..20: mol_type = other RNA
ggtcgggacaaagtttaggg

SEQ ID NO: 9941 - RNA, 20 nt, synthetic construct
  source 1..20: mol_type = other RNA
ggtctatgtggggccacacc

SEQ ID NO: 9942 - RNA, 20 nt, synthetic construct
  source 1..20: mol_type = other RNA
ggtctcaactacggacctca

SEQ ID NO: 9943 - RNA, 20 nt, synthetic construct
  source 1..20: mol_type = other RNA
ggtctcccctgctccccgcc

SEQ ID NO: 9944 - RNA, 20 nt, synthetic construct
  source 1..20: mol_type = other RNA
ggtctctacaaaaaataata

SEQ ID NO: 9945 - RNA, 20 nt, synthetic construct
  source 1..20: mol_type = other RNA
ggtctgggggaggcgtcgcc

SEQ ID NO: 9946 - RNA, 20 nt, synthetic construct
  source 1..20: mol_type = other RNA
ggtcttttcgtacagagggc

SEQ ID NO: 9947 - RNA, 20 nt, synthetic construct
  source 1..20: mol_type = other RNA
ggtgaagcctggtctctaca

SEQ ID NO: 9948 - RNA, 20 nt, synthetic construct
  source 1..20: mol_type = other RNA
ggtgcagagcgggagaggaa

SEQ ID NO: 9949 - RNA, 20 nt, synthetic construct
  source 1..20: mol_type = other RNA
ggtgccttagtttcttcatc

SEQ ID NO: 9950 - RNA, 20 nt, synthetic construct
  source 1..20: mol_type = other RNA
ggtgcgcacccccttcccca

SEQ ID NO: 9951 - RNA, 20 nt, synthetic construct
  source 1..20: mol_type = other RNA
ggtgctaggacatgcgaact

SEQ ID NO: 9952 - RNA, 20 nt, synthetic construct
  source 1..20: mol_type = other RNA
ggtggcccgccgtggggcta

SEQ ID NO: 9953 - RNA, 20 nt, synthetic construct
  source 1..20: mol_type = other RNA
ggtggcctgggagtggggaa

SEQ ID NO: 9954 - RNA, 20 nt, synthetic construct
  source 1..20: mol_type = other RNA
ggtggctcgtgcctgtggtc

SEQ ID NO: 9955 - RNA, 20 nt, synthetic construct
  source 1..20: mol_type = other RNA
ggtgtggccccacatagacc

SEQ ID NO: 9956 - RNA, 20 nt, synthetic construct
  source 1..20: mol_type = other RNA
ggttaggcttgacttcaatc

SEQ ID NO: 9957 - RNA, 20 nt, synthetic construct
  source 1..20: mol_type = other RNA
ggttatcttctgcctctcac

SEQ ID NO: 9958 - RNA, 20 nt, synthetic construct
  source 1..20: mol_type = other RNA
ggttgggcgtggtagcttac

SEQ ID NO: 9959 - RNA, 20 nt, synthetic construct
  source 1..20: mol_type = other RNA
ggttgggggagggtttctct

SEQ ID NO: 9960 - RNA, 20 nt, synthetic construct
  source 1..20: mol_type = other RNA
ggttgtttccaagatgtact

SEQ ID NO: 9961 - RNA, 20 nt, synthetic construct
  source 1..20: mol_type = other RNA
ggtttcgaataattaactta

SEQ ID NO: 9962 - RNA, 20 nt, synthetic construct
  source 1..20: mol_type = other RNA
ggtttctcttccgctctttc

SEQ ID NO: 9963 - RNA, 20 nt, synthetic construct
  source 1..20: mol_type = other RNA
ggtttgtgaacgcgtggagg

SEQ ID NO: 9964 - RNA, 20 nt, synthetic construct
  source 1..20: mol_type = other RNA
ggttttgaaaacatgagggg

SEQ ID NO: 9965 - RNA, 20 nt, synthetic construct
  source 1..20: mol_type = other RNA
gtaagaggcacagtacatct

SEQ ID NO: 9966 - RNA, 20 nt, synthetic construct
  source 1..20: mol_type = other RNA
gtaagcctgtctgctgcggc

SEQ ID NO: 9967 - RNA, 20 nt, synthetic construct
  source 1..20: mol_type = other RNA
gtaagctaccacgcccaacc

SEQ ID NO: 9968 - RNA, 20 nt, synthetic construct
  source 1..20: mol_type = other RNA
gtacagagggcttcctcttt

SEQ ID NO: 9969 - RNA, 20 nt, synthetic construct
  source 1..20: mol_type = other RNA
gtacatcttggaaacaacca

SEQ ID NO: 9970 - RNA, 20 nt, synthetic construct
  source 1..20: mol_type = other RNA
gtacgaaaagaccacagggc

SEQ ID NO: 9971 - RNA, 20 nt, synthetic construct
  source 1..20: mol_type = other RNA
gtactgtgcctcttactttc

SEQ ID NO: 9972 - RNA, 20 nt, synthetic construct
  source 1..20: mol_type = other RNA
gtagaatgcttggctgtgat

SEQ ID NO: 9973 - RNA, 20 nt, synthetic construct
  source 1..20: mol_type = other RNA
gtagcgcgcgtcccgggtgc

SEQ ID NO: 9974 - RNA, 20 nt, synthetic construct
  source 1..20: mol_type = other RNA
gtaggccaaaggtctcccct

SEQ ID NO: 9975 - RNA, 20 nt, synthetic construct
  source 1..20: mol_type = other RNA
gtaggctcgtcccaaaggcg

SEQ ID NO: 9976 - RNA, 20 nt, synthetic construct
  source 1..20: mol_type = other RNA
gtagttatctatggcggaag

SEQ ID NO: 9977 - RNA, 20 nt, synthetic construct
  source 1..20: mol_type = other RNA
gtatcacagccaagcattct

SEQ ID NO: 9978 - RNA, 20 nt, synthetic construct
  source 1..20: mol_type = other RNA
gtcaagcctaaccagggctt

SEQ ID NO: 9979 - RNA, 20 nt, synthetic construct
  source 1..20: mol_type = other RNA
gtcaataacgggtagttctt

SEQ ID NO: 9980 - RNA, 20 nt, synthetic construct
  source 1..20: mol_type = other RNA
gtcacggagcgagagagcac

SEQ ID NO: 9981 - RNA, 20 nt, synthetic construct
  source 1..20: mol_type = other RNA
gtcagagcgccgaggttggg

SEQ ID NO: 9982 - RNA, 20 nt, synthetic construct
  source 1..20: mol_type = other RNA
gtccacagctctccagtcta

SEQ ID NO: 9983 - RNA, 20 nt, synthetic construct
  source 1..20: mol_type = other RNA
gtccagggctggatctcggg

SEQ ID NO: 9984 - RNA, 20 nt, synthetic construct
  source 1..20: mol_type = other RNA
gtcccaaaggcgcggcgctg

SEQ ID NO: 9985 - RNA, 20 nt, synthetic construct
  source 1..20: mol_type = other RNA
gtcccagctgctccggtggc

SEQ ID NO: 9986 - RNA, 20 nt, synthetic construct
  source 1..20: mol_type = other RNA
gtcccccactccagctgcgc

SEQ ID NO: 9987 - RNA, 20 nt, synthetic construct
  source 1..20: mol_type = other RNA
gtcccgaccctcccgtcgcc

SEQ ID NO: 9988 - RNA, 20 nt, synthetic construct
  source 1..20: mol_type = other RNA
gtcccgggtgcgcaccccct

SEQ ID NO: 9989 - RNA, 20 nt, synthetic construct
  source 1..20: mol_type = other RNA
gtccgtagttgagaccagcc

SEQ ID NO: 9990 - RNA, 20 nt, synthetic construct
  source 1..20: mol_type = other RNA
gtcctagcacctctgggtct

SEQ ID NO: 9991 - RNA, 20 nt, synthetic construct
  source 1..20: mol_type = other RNA
gtccttcctctcccgctctg

SEQ ID NO: 9992 - RNA, 20 nt, synthetic construct
  source 1..20: mol_type = other RNA
gtccttggcacacagaaaga

SEQ ID NO: 9993 - RNA, 20 nt, synthetic construct
  source 1..20: mol_type = other RNA
gtcgataagcgtcagagcgc

SEQ ID NO: 9994 - RNA, 20 nt, synthetic construct
  source 1..20: mol_type = other RNA
gtcgcccgggtaagcctgtc

SEQ ID NO: 9995 - RNA, 20 nt, synthetic construct
  source 1..20: mol_type = other RNA
gtcgccgtaggccaaaggtc

SEQ ID NO: 9996 - RNA, 20 nt, synthetic construct
  source 1..20: mol_type = other RNA
gtcgcgtgctgtttcctccc

SEQ ID NO: 9997 - RNA, 20 nt, synthetic construct
  source 1..20: mol_type = other RNA
gtcgggacaaagtttagggc

SEQ ID NO: 9998 - RNA, 20 nt, synthetic construct
  source 1..20: mol_type = other RNA
gtctaagggaagcagagccg

SEQ ID NO: 9999 - RNA, 20 nt, synthetic construct
  source 1..20: mol_type = other RNA
gtctaggcgcccgctaagtt

SEQ ID NO: 10000 - RNA, 20 nt, synthetic construct
  source 1..20: mol_type = other RNA
gtctatgtggggccacaccg

SEQ ID NO: 10001 - RNA, 20 nt, synthetic construct
  source 1..20: mol_type = other RNA
gtctcaactacggacctcaa

SEQ ID NO: 10002 - RNA, 20 nt, synthetic construct
  source 1..20: mol_type = other RNA
gtctcccctgctccccgccg

SEQ ID NO: 10003 - RNA, 20 nt, synthetic construct
  source 1..20: mol_type = other RNA
gtctctcctaccctcccgct

SEQ ID NO: 10004 - RNA, 20 nt, synthetic construct
  source 1..20: mol_type = other RNA
gtctgctgcggctctgcttc

SEQ ID NO: 10005 - RNA, 20 nt, synthetic construct
  source 1..20: mol_type = other RNA
gtctgggggaggcgtcgccc

SEQ ID NO: 10006 - RNA, 20 nt, synthetic construct
  source 1..20: mol_type = other RNA
gtcttttcgtacagagggct

SEQ ID NO: 10007 - RNA, 20 nt, synthetic construct
  source 1..20: mol_type = other RNA
gtgaacgcgtggaggggcgc

SEQ ID NO: 10008 - RNA, 20 nt, synthetic construct
  source 1..20: mol_type = other RNA
gtgaagcctggtctctacaa

SEQ ID NO: 10009 - RNA, 20 nt, synthetic construct
  source 1..20: mol_type = other RNA
gtgacatgtgatgggaacaa

SEQ ID NO: 10010 - RNA, 20 nt, synthetic construct
  source 1..20: mol_type = other RNA
gtgacttcccttctccaagt

SEQ ID NO: 10011 - RNA, 20 nt, synthetic construct
  source 1..20: mol_type = other RNA
gtgagaggcagaagataacc

SEQ ID NO: 10012 - RNA, 20 nt, synthetic construct
  source 1..20: mol_type = other RNA
gtgagattctccagagcaaa

SEQ ID NO: 10013 - RNA, 20 nt, synthetic construct
  source 1..20: mol_type = other RNA
gtgagtctctcctaccctcc

SEQ ID NO: 10014 - RNA, 20 nt, synthetic construct
  source 1..20: mol_type = other RNA
gtgatacaaagcggtttcga

SEQ ID NO: 10015 - RNA, 20 nt, synthetic construct
  source 1..20: mol_type = other RNA
gtgatgggaacaaataagtt

SEQ ID NO: 10016 - RNA, 20 nt, synthetic construct
  source 1..20: mol_type = other RNA
gtgcactccagcgtgggcaa

SEQ ID NO: 10017 - RNA, 20 nt, synthetic construct
  source 1..20: mol_type = other RNA
gtgcactggcgccatgatag

SEQ ID NO: 10018 - RNA, 20 nt, synthetic construct
  source 1..20: mol_type = other RNA
gtgcagagcgggagaggaag

SEQ ID NO: 10019 - RNA, 20 nt, synthetic construct
  source 1..20: mol_type = other RNA
gtgccaaggactttatgtgc

SEQ ID NO: 10020 - RNA, 20 nt, synthetic construct
  source 1..20: mol_type = other RNA
gtgcctcttactttcggttt

SEQ ID NO: 10021 - RNA, 20 nt, synthetic construct
  source 1..20: mol_type = other RNA
gtgcctgtggtcccagctgc

SEQ ID NO: 10022 - RNA, 20 nt, synthetic construct
  source 1..20: mol_type = other RNA
gtgccttagtttcttcatct

SEQ ID NO: 10023 - RNA, 20 nt, synthetic construct
  source 1..20: mol_type = other RNA
gtgcgcacccccttccccac

SEQ ID NO: 10024 - RNA, 20 nt, synthetic construct
  source 1..20: mol_type = other RNA
gtgctaggacatgcgaactt

SEQ ID NO: 10025 - RNA, 20 nt, synthetic construct
  source 1..20: mol_type = other RNA
gtgctctctcgctccgtgac

SEQ ID NO: 10026 - RNA, 20 nt, synthetic construct
  source 1..20: mol_type = other RNA
gtgctgtttcctccccacgg

SEQ ID NO: 10027 - RNA, 20 nt, synthetic construct
  source 1..20: mol_type = other RNA
gtgctttgcgtcatttaatt

SEQ ID NO: 10028 - RNA, 20 nt, synthetic construct
  source 1..20: mol_type = other RNA
gtggacttcgtctaggcgcc

SEQ ID NO: 10029 - RNA, 20 nt, synthetic construct
  source 1..20: mol_type = other RNA
gtggaggggcgcttggggtc

SEQ ID NO: 10030 - RNA, 20 nt, synthetic construct
  source 1..20: mol_type = other RNA
gtggccccacatagacccag

SEQ ID NO: 10031 - RNA, 20 nt, synthetic construct
  source 1..20: mol_type = other RNA
gtggcccgccgtggggctag

SEQ ID NO: 10032 - RNA, 20 nt, synthetic construct
  source 1..20: mol_type = other RNA
gtggccctcgctgtgctctc

SEQ ID NO: 10033 - RNA, 20 nt, synthetic construct
  source 1..20: mol_type = other RNA
gtggcctgggagtggggaag

SEQ ID NO: 10034 - RNA, 20 nt, synthetic construct
  source 1..20: mol_type = other RNA
gtggggaagggggtgcgcac

SEQ ID NO: 10035 - RNA, 20 nt, synthetic construct
  source 1..20: mol_type = other RNA
gtggggaggaaacagcacgc

SEQ ID NO: 10036 - RNA, 20 nt, synthetic construct
  source 1..20: mol_type = other RNA
gtggggccacaccgtgggga

SEQ ID NO: 10037 - RNA, 20 nt, synthetic construct
  source 1..20: mol_type = other RNA
gtggggctagtccagggctg

SEQ ID NO: 10038 - RNA, 20 nt, synthetic construct
  source 1..20: mol_type = other RNA
gtgggggacgggtaggctcg

SEQ ID NO: 10039 - RNA, 20 nt, synthetic construct
  source 1..20: mol_type = other RNA
gtggtcccagctgctccggt

SEQ ID NO: 10040 - RNA, 20 nt, synthetic construct
  source 1..20: mol_type = other RNA
gtggtcttttcgtacagagg

SEQ ID NO: 10041 - RNA, 20 nt, synthetic construct
  source 1..20: mol_type = other RNA
gtgtgccaaggactttatgt

SEQ ID NO: 10042 - RNA, 20 nt, synthetic construct
  source 1..20: mol_type = other RNA
gtgtggccccacatagaccc

SEQ ID NO: 10043 - RNA, 20 nt, synthetic construct
  source 1..20: mol_type = other RNA
gttaattattcgaaaccgct

SEQ ID NO: 10044 - RNA, 20 nt, synthetic construct
  source 1..20: mol_type = other RNA
gttaggcttgacttcaatct

SEQ ID NO: 10045 - RNA, 20 nt, synthetic construct
  source 1..20: mol_type = other RNA
gttatctatggcggaagata

SEQ ID NO: 10046 - RNA, 20 nt, synthetic construct
  source 1..20: mol_type = other RNA
gttatcttccgccatagata

SEQ ID NO: 10047 - RNA, 20 nt, synthetic construct
  source 1..20: mol_type = other RNA
gttatcttctgcctctcaca

SEQ ID NO: 10048 - RNA, 20 nt, synthetic construct
  source 1..20: mol_type = other RNA
gttattgacatctttctgtg

SEQ ID NO: 10049 - RNA, 20 nt, synthetic construct
  source 1..20: mol_type = other RNA
gttcacaaacctcagcgccg

SEQ ID NO: 10050 - RNA, 20 nt, synthetic construct
  source 1..20: mol_type = other RNA
gttcccatcacatgtcactt

SEQ ID NO: 10051 - RNA, 20 nt, synthetic construct
  source 1..20: mol_type = other RNA
gttcgcatgtcctagcacct

SEQ ID NO: 10052 - RNA, 20 nt, synthetic construct
  source 1..20: mol_type = other RNA
gttctccttggtggcccgcc

SEQ ID NO: 10053 - RNA, 20 nt, synthetic construct
  source 1..20: mol_type = other RNA
gttgcccacgctggagtgca

SEQ ID NO: 10054 - RNA, 20 nt, synthetic construct
  source 1..20: mol_type = other RNA
gttggccaggctggtctcaa

SEQ ID NO: 10055 - RNA, 20 nt, synthetic construct
  source 1..20: mol_type = other RNA
gttgggcgtggtagcttacg

SEQ ID NO: 10056 - RNA, 20 nt, synthetic construct
  source 1..20: mol_type = other RNA
gttgggggagggtttctctt

SEQ ID NO: 10057 - RNA, 20 nt, synthetic construct
  source 1..20: mol_type = other RNA
gttgtttccaagatgtactg

SEQ ID NO: 10058 - RNA, 20 nt, synthetic construct
  source 1..20: mol_type = other RNA
gtttagggcgtcgataagcg

SEQ ID NO: 10059 - RNA, 20 nt, synthetic construct
  source 1..20: mol_type = other RNA
gtttccaagatgtactgtgc

SEQ ID NO: 10060 - RNA, 20 nt, synthetic construct
  source 1..20: mol_type = other RNA
gtttcctccccacggtgtgg

SEQ ID NO: 10061 - RNA, 20 nt, synthetic construct
  source 1..20: mol_type = other RNA
gtttctcttccgctctttcg

SEQ ID NO: 10062 - RNA, 20 nt, synthetic construct
  source 1..20: mol_type = other RNA
gtttcttaaaatctcggtgc

SEQ ID NO: 10063 - RNA, 20 nt, synthetic construct
  source 1..20: mol_type = other RNA
gtttcttcatctgtgagagg

SEQ ID NO: 10064 - RNA, 20 nt, synthetic construct
  source 1..20: mol_type = other RNA
gtttgctctggagaatctca

SEQ ID NO: 10065 - RNA, 20 nt, synthetic construct
  source 1..20: mol_type = other RNA
gtttgtagaatgcttggctg

SEQ ID NO: 10066 - RNA, 20 nt, synthetic construct
  source 1..20: mol_type = other RNA
gtttgtgaacgcgtggaggg

SEQ ID NO: 10067 - RNA, 20 nt, synthetic construct
  source 1..20: mol_type = other RNA
gttttcaaaaccgaaagtaa

SEQ ID NO: 10068 - RNA, 20 nt, synthetic construct
  source 1..20: mol_type = other RNA
gttttcaaaattaaatgacg

SEQ ID NO: 10069 - RNA, 20 nt, synthetic construct
  source 1..20: mol_type = other RNA
gttttgaaaacatgaggggg

SEQ ID NO: 10070 - RNA, 20 nt, synthetic construct
  source 1..20: mol_type = other RNA
taaaagtgacatgtgatggg

SEQ ID NO: 10071 - RNA, 20 nt, synthetic construct
  source 1..20: mol_type = other RNA
taaaatctcggtgccttagt

SEQ ID NO: 10072 - RNA, 20 nt, synthetic construct
  source 1..20: mol_type = other RNA
taaactttgtcccgaccctc

SEQ ID NO: 10073 - RNA, 20 nt, synthetic construct
  source 1..20: mol_type = other RNA
taaagtccttggcacacaga

SEQ ID NO: 10074 - RNA, 20 nt, synthetic construct
  source 1..20: mol_type = other RNA
taaatgacgcaaagcacata

SEQ ID NO: 10075 - RNA, 20 nt, synthetic construct
  source 1..20: mol_type = other RNA
taaatggcagcaatcgagat

SEQ ID NO: 10076 - RNA, 20 nt, synthetic construct
  source 1..20: mol_type = other RNA
taaccagggcttttgcggga

SEQ ID NO: 10077 - RNA, 20 nt, synthetic construct
  source 1..20: mol_type = other RNA
taaccatagtagttatctat

SEQ ID NO: 10078 - RNA, 20 nt, synthetic construct
  source 1..20: mol_type = other RNA
taacgggtagttcttataat

SEQ ID NO: 10079 - RNA, 20 nt, synthetic construct
  source 1..20: mol_type = other RNA
taactactatggttatcttc

SEQ ID NO: 10080 - RNA, 20 nt, synthetic construct
  source 1..20: mol_type = other RNA
taacttatttgttcccatca

SEQ ID NO: 10081 - RNA, 20 nt, synthetic construct
  source 1..20: mol_type = other RNA
taagaaaaacgcctgccttc

SEQ ID NO: 10082 - RNA, 20 nt, synthetic construct
  source 1..20: mol_type = other RNA
taagaaacttaattacacag

SEQ ID NO: 10083 - RNA, 20 nt, synthetic construct
  source 1..20: mol_type = other RNA
taagaactacccgttattga

SEQ ID NO: 10084 - RNA, 20 nt, synthetic construct
  source 1..20: mol_type = other RNA
taagaggcacagtacatctt

SEQ ID NO: 10085 - RNA, 20 nt, synthetic construct
  source 1..20: mol_type = other RNA
taagcctgtctgctgcggct

SEQ ID NO: 10086 - RNA, 20 nt, synthetic construct
  source 1..20: mol_type = other RNA
taagcgtcagagcgccgagg

SEQ ID NO: 10087 - RNA, 20 nt, synthetic construct
  source 1..20: mol_type = other RNA
taagctaccacgcccaaccc

SEQ ID NO: 10088 - RNA, 20 nt, synthetic construct
  source 1..20: mol_type = other RNA
taaggcaccgagattttaag

SEQ ID NO: 10089 - RNA, 20 nt, synthetic construct
  source 1..20: mol_type = other RNA
taagggaagcagagccgcag

SEQ ID NO: 10090 - RNA, 20 nt, synthetic construct
  source 1..20: mol_type = other RNA
taagttaattattcgaaacc

SEQ ID NO: 10091 - RNA, 20 nt, synthetic construct
  source 1..20: mol_type = other RNA
taagttcgcatgtcctagca

SEQ ID NO: 10092 - RNA, 20 nt, synthetic construct
  source 1..20: mol_type = other RNA
taagtttcttaaaatctcgg

SEQ ID NO: 10093 - RNA, 20 nt, synthetic construct
  source 1..20: mol_type = other RNA
taataacaaaaattagccgg

SEQ ID NO: 10094 - RNA, 20 nt, synthetic construct
  source 1..20: mol_type = other RNA
taattaacttatttgttccc

SEQ ID NO: 10095 - RNA, 20 nt, synthetic construct
  source 1..20: mol_type = other RNA
taattacacaggggataaat

SEQ ID NO: 10096 - RNA, 20 nt, synthetic construct
  source 1..20: mol_type = other RNA
taattattcgaaaccgcttt

SEQ ID NO: 10097 - RNA, 20 nt, synthetic construct
  source 1..20: mol_type = other RNA
tacaaacgtcgcgtgctgtt

SEQ ID NO: 10098 - RNA, 20 nt, synthetic construct
  source 1..20: mol_type = other RNA
tacaaagcggtttcgaataa

SEQ ID NO: 10099 - RNA, 20 nt, synthetic construct
  source 1..20: mol_type = other RNA
tacacaggggataaatggca

SEQ ID NO: 10100 - RNA, 20 nt, synthetic construct
  source 1..20: mol_type = other RNA
tacagagggcttcctctttg

SEQ ID NO: 10101 - RNA, 20 nt, synthetic construct
  source 1..20: mol_type = other RNA
tacagccaaaaggcatgcgc

SEQ ID NO: 10102 - RNA, 20 nt, synthetic construct
  source 1..20: mol_type = other RNA
tacaggcgtaagctaccacg

SEQ ID NO: 10103 - RNA, 20 nt, synthetic construct
  source 1..20: mol_type = other RNA
tacatcttggaaacaaccag

SEQ ID NO: 10104 - RNA, 20 nt, synthetic construct
  source 1..20: mol_type = other RNA
taccacgcccaaccccctca

SEQ ID NO: 10105 - RNA, 20 nt, synthetic construct
  source 1..20: mol_type = other RNA
tacccgggcgacgcctcccc

SEQ ID NO: 10106 - RNA, 20 nt, synthetic construct
  source 1..20: mol_type = other RNA
tacccgtcccccactccagc

SEQ ID NO: 10107 - RNA, 20 nt, synthetic construct
  source 1..20: mol_type = other RNA
tacccgttattgacatcttt

SEQ ID NO: 10108 - RNA, 20 nt, synthetic construct
  source 1..20: mol_type = other RNA
taccctcccgctctggtcct

SEQ ID NO: 10109 - RNA, 20 nt, synthetic construct
  source 1..20: mol_type = other RNA
tacgaaaagaccacagggcc

SEQ ID NO: 10110 - RNA, 20 nt, synthetic construct
  source 1..20: mol_type = other RNA
tacggacctcaagccatcct

SEQ ID NO: 10111 - RNA, 20 nt, synthetic construct
  source 1..20: mol_type = other RNA
tacggcgacgggagggtcgg

SEQ ID NO: 10112 - RNA, 20 nt, synthetic construct
  source 1..20: mol_type = other RNA
tactatggttatcttctgcc

SEQ ID NO: 10113 - RNA, 20 nt, synthetic construct
  source 1..20: mol_type = other RNA
tactgtgcctcttactttcg

SEQ ID NO: 10114 - RNA, 20 nt, synthetic construct
  source 1..20: mol_type = other RNA
tacttgcccctttcggcggg

SEQ ID NO: 10115 - RNA, 20 nt, synthetic construct
  source 1..20: mol_type = other RNA
tactttcggttttgaaaaca

SEQ ID NO: 10116 - RNA, 20 nt, synthetic construct
  source 1..20: mol_type = other RNA
tagaatgcttggctgtgata

SEQ ID NO: 10117 - RNA, 20 nt, synthetic construct
  source 1..20: mol_type = other RNA
tagacccagaggtgctagga

SEQ ID NO: 10118 - RNA, 20 nt, synthetic construct
  source 1..20: mol_type = other RNA
tagacgaagtccacagctct

SEQ ID NO: 10119 - RNA, 20 nt, synthetic construct
  source 1..20: mol_type = other RNA
tagactggagagctgtggac

SEQ ID NO: 10120 - RNA, 20 nt, synthetic construct
  source 1..20: mol_type = other RNA
tagataactactatggttat

SEQ ID NO: 10121 - RNA, 20 nt, synthetic construct
  source 1..20: mol_type = other RNA
tagcacctctgggtctatgt

SEQ ID NO: 10122 - RNA, 20 nt, synthetic construct
  source 1..20: mol_type = other RNA
tagccccacggcgggccacc

SEQ ID NO: 10123 - RNA, 20 nt, synthetic construct
  source 1..20: mol_type = other RNA
tagccgggtgtggtggctcg

SEQ ID NO: 10124 - RNA, 20 nt, synthetic construct
  source 1..20: mol_type = other RNA
tagcgcgcgtcccgggtgcg

SEQ ID NO: 10125 - RNA, 20 nt, synthetic construct
  source 1..20: mol_type = other RNA
tagcgggcgcctagacgaag

SEQ ID NO: 10126 - RNA, 20 nt, synthetic construct
  source 1..20: mol_type = other RNA
tagctcaaaagcctaagctc

SEQ ID NO: 10127 - RNA, 20 nt, synthetic construct
  source 1..20: mol_type = other RNA
taggacatgcgaacttagcg

SEQ ID NO: 10128 - RNA, 20 nt, synthetic construct
  source 1..20: mol_type = other RNA
taggccaaaggtctcccctg

SEQ ID NO: 10129 - RNA, 20 nt, synthetic construct
  source 1..20: mol_type = other RNA
taggcgcccgctaagttcgc

SEQ ID NO: 10130 - RNA, 20 nt, synthetic construct
  source 1..20: mol_type = other RNA
taggctcgtcccaaaggcgc

SEQ ID NO: 10131 - RNA, 20 nt, synthetic construct
  source 1..20: mol_type = other RNA
taggcttgacttcaatctcg

SEQ ID NO: 10132 - RNA, 20 nt, synthetic construct
  source 1..20: mol_type = other RNA
taggcttttgagctatcatg

SEQ ID NO: 10133 - RNA, 20 nt, synthetic construct
  source 1..20: mol_type = other RNA
tagggaggccgaggcgggag

SEQ ID NO: 10134 - RNA, 20 nt, synthetic construct
  source 1..20: mol_type = other RNA
tagggcgtcgataagcgtca

SEQ ID NO: 10135 - RNA, 20 nt, synthetic construct
  source 1..20: mol_type = other RNA
tagtagttatctatggcgga

SEQ ID NO: 10136 - RNA, 20 nt, synthetic construct
  source 1..20: mol_type = other RNA
tagtccagggctggatctcg

SEQ ID NO: 10137 - RNA, 20 nt, synthetic construct
  source 1..20: mol_type = other RNA
tagttatctatggcggaaga

SEQ ID NO: 10138 - RNA, 20 nt, synthetic construct
  source 1..20: mol_type = other RNA
tagtttcttcatctgtgaga

SEQ ID NO: 10139 - RNA, 20 nt, synthetic construct
  source 1..20: mol_type = other RNA
tataagaactacccgttatt

SEQ ID NO: 10140 - RNA, 20 nt, synthetic construct
  source 1..20: mol_type = other RNA
tatcacagccaagcattcta

SEQ ID NO: 10141 - RNA, 20 nt, synthetic construct
  source 1..20: mol_type = other RNA
tatcatggcgccagtgcact

SEQ ID NO: 10142 - RNA, 20 nt, synthetic construct
  source 1..20: mol_type = other RNA
tatcccctgtgtaattaagt

SEQ ID NO: 10143 - RNA, 20 nt, synthetic construct
  source 1..20: mol_type = other RNA
tatcgacgccctaaactttg

SEQ ID NO: 10144 - RNA, 20 nt, synthetic construct
  source 1..20: mol_type = other RNA
tatctatggcggaagataac

SEQ ID NO: 10145 - RNA, 20 nt, synthetic construct
  source 1..20: mol_type = other RNA
tatcttccgccatagataac

SEQ ID NO: 10146 - RNA, 20 nt, synthetic construct
  source 1..20: mol_type = other RNA
tatcttctgcctctcacaga

SEQ ID NO: 10147 - RNA, 20 nt, synthetic construct
  source 1..20: mol_type = other RNA
tatggcggaagataactgtt

SEQ ID NO: 10148 - RNA, 20 nt, synthetic construct
  source 1..20: mol_type = other RNA
tatggttatcttctgcctct

SEQ ID NO: 10149 - RNA, 20 nt, synthetic construct
  source 1..20: mol_type = other RNA
tatgtgctttgcgtcattta

SEQ ID NO: 10150 - RNA, 20 nt, synthetic construct
  source 1..20: mol_type = other RNA
tatgtggggccacaccgtgg

SEQ ID NO: 10151 - RNA, 20 nt, synthetic construct
  source 1..20: mol_type = other RNA
tattattttttgtagagacc

SEQ ID NO: 10152 - RNA, 20 nt, synthetic construct
  source 1..20: mol_type = other RNA
tattcgaaaccgctttgtat

SEQ ID NO: 10153 - RNA, 20 nt, synthetic construct
  source 1..20: mol_type = other RNA
tattgacatctttctgtgtg

SEQ ID NO: 10154 - RNA, 20 nt, synthetic construct
  source 1..20: mol_type = other RNA
tatttgttcccatcacatgt

SEQ ID NO: 10155 - RNA, 20 nt, synthetic construct
  source 1..20: mol_type = other RNA
tattttttgtagagaccagg

SEQ ID NO: 10156 - RNA, 20 nt, synthetic construct
  source 1..20: mol_type = other RNA
tcaaaaccgaaagtaagagg

SEQ ID NO: 10157 - RNA, 20 nt, synthetic construct
  source 1..20: mol_type = other RNA
tcaaaagcctaagctcaaga

SEQ ID NO: 10158 - RNA, 20 nt, synthetic construct
  source 1..20: mol_type = other RNA
tcaaaattaaatgacgcaaa

SEQ ID NO: 10159 - RNA, 20 nt, synthetic construct
  source 1..20: mol_type = other RNA
tcaactacggacctcaagcc

SEQ ID NO: 10160 - RNA, 20 nt, synthetic construct
  source 1..20: mol_type = other RNA
tcaagagatcctcccgcctc

SEQ ID NO: 10161 - RNA, 20 nt, synthetic construct
  source 1..20: mol_type = other RNA
tcaagcctaaccagggcttt

SEQ ID NO: 10162 - RNA, 20 nt, synthetic construct
  source 1..20: mol_type = other RNA
tcaataacgggtagttctta

SEQ ID NO: 10163 - RNA, 20 nt, synthetic construct
  source 1..20: mol_type = other RNA
tcaatctcgattgctgccat

SEQ ID NO: 10164 - RNA, 20 nt, synthetic construct
  source 1..20: mol_type = other RNA
tcacaaacctcagcgccgcg

SEQ ID NO: 10165 - RNA, 20 nt, synthetic construct
  source 1..20: mol_type = other RNA
tcacagatgaagaaactaag

SEQ ID NO: 10166 - RNA, 20 nt, synthetic construct
  source 1..20: mol_type = other RNA
tcacagccaagcattctaca

SEQ ID NO: 10167 - RNA, 20 nt, synthetic construct
  source 1..20: mol_type = other RNA
tcacatgtcacttttaaaaa

SEQ ID NO: 10168 - RNA, 20 nt, synthetic construct
  source 1..20: mol_type = other RNA
tcacgcagaaggcaggcgtt

SEQ ID NO: 10169 - RNA, 20 nt, synthetic construct
  source 1..20: mol_type = other RNA
tcacggagcgagagagcaca

SEQ ID NO: 10170 - RNA, 20 nt, synthetic construct
  source 1..20: mol_type = other RNA
tcagagcgccgaggttgggg

SEQ ID NO: 10171 - RNA, 20 nt, synthetic construct
  source 1..20: mol_type = other RNA
tcagccaccggagcagctgg

SEQ ID NO: 10172 - RNA, 20 nt, synthetic construct
  source 1..20: mol_type = other RNA
tcagcgccgcgcctttggga

SEQ ID NO: 10173 - RNA, 20 nt, synthetic construct
  source 1..20: mol_type = other RNA
tcatctgtgagaggcagaag

SEQ ID NO: 10174 - RNA, 20 nt, synthetic construct
  source 1..20: mol_type = other RNA
tcatggcgccagtgcactcc

SEQ ID NO: 10175 - RNA, 20 nt, synthetic construct
  source 1..20: mol_type = other RNA
tcatgttttcaaaaccgaaa

SEQ ID NO: 10176 - RNA, 20 nt, synthetic construct
  source 1..20: mol_type = other RNA
tccaagatgtactgtgcctc

SEQ ID NO: 10177 - RNA, 20 nt, synthetic construct
  source 1..20: mol_type = other RNA
tccaagttctccttggtggc

SEQ ID NO: 10178 - RNA, 20 nt, synthetic construct
  source 1..20: mol_type = other RNA
tccacagctctccagtctaa

SEQ ID NO: 10179 - RNA, 20 nt, synthetic construct
  source 1..20: mol_type = other RNA
tccacgcgttcacaaacctc

SEQ ID NO: 10180 - RNA, 20 nt, synthetic construct
  source 1..20: mol_type = other RNA
tccagagcaaactgggcggc

SEQ ID NO: 10181 - RNA, 20 nt, synthetic construct
  source 1..20: mol_type = other RNA
tccagccctggactagcccc

SEQ ID NO: 10182 - RNA, 20 nt, synthetic construct
  source 1..20: mol_type = other RNA
tccagctgcgctgggggagc

SEQ ID NO: 10183 - RNA, 20 nt, synthetic construct
  source 1..20: mol_type = other RNA
tccagggctggatctcgggg

SEQ ID NO: 10184 - RNA, 20 nt, synthetic construct
  source 1..20: mol_type = other RNA
tccagtctaagggaagcaga

SEQ ID NO: 10185 - RNA, 20 nt, synthetic construct
  source 1..20: mol_type = other RNA
tcccaaaggcgcggcgctga

SEQ ID NO: 10186 - RNA, 20 nt, synthetic construct
  source 1..20: mol_type = other RNA
tcccagctgctccggtggct

SEQ ID NO: 10187 - RNA, 20 nt, synthetic construct
  source 1..20: mol_type = other RNA
tcccaggccaccccgccgct

SEQ ID NO: 10188 - RNA, 20 nt, synthetic construct
  source 1..20: mol_type = other RNA
tcccatcacatgtcactttt

SEQ ID NO: 10189 - RNA, 20 nt, synthetic construct
  source 1..20: mol_type = other RNA
tccccacggtgtggccccac

SEQ ID NO: 10190 - RNA, 20 nt, synthetic construct
  source 1..20: mol_type = other RNA
tccccactcccaggccaccc

SEQ ID NO: 10191 - RNA, 20 nt, synthetic construct
  source 1..20: mol_type = other RNA
tcccccaacctcggcgctct

SEQ ID NO: 10192 - RNA, 20 nt, synthetic construct
  source 1..20: mol_type = other RNA
tcccccactccagctgcgct

SEQ ID NO: 10193 - RNA, 20 nt, synthetic construct
  source 1..20: mol_type = other RNA
tcccccagaccccaagcgcc

SEQ ID NO: 10194 - RNA, 20 nt, synthetic construct
  source 1..20: mol_type = other RNA
tcccccagcgcagctggagt

SEQ ID NO: 10195 - RNA, 20 nt, synthetic construct
  source 1..20: mol_type = other RNA
tccccgagatccagccctgg

SEQ ID NO: 10196 - RNA, 20 nt, synthetic construct
  source 1..20: mol_type = other RNA
tccccgccgaaaggggcaag

SEQ ID NO: 10197 - RNA, 20 nt, synthetic construct
  source 1..20: mol_type = other RNA
tcccctgctccccgccgaaa

SEQ ID NO: 10198 - RNA, 20 nt, synthetic construct
  source 1..20: mol_type = other RNA
tcccctgtgtaattaagttt

SEQ ID NO: 10199 - RNA, 20 nt, synthetic construct
  source 1..20: mol_type = other RNA
tcccgaccctcccgtcgccg

SEQ ID NO: 10200 - RNA, 20 nt, synthetic construct
  source 1..20: mol_type = other RNA
tcccgcaaaagccctggtta

SEQ ID NO: 10201 - RNA, 20 nt, synthetic construct
  source 1..20: mol_type = other RNA
tcccgcctcagccaccggag

SEQ ID NO: 10202 - RNA, 20 nt, synthetic construct
  source 1..20: mol_type = other RNA
tcccgctctgcaccctctgt

SEQ ID NO: 10203 - RNA, 20 nt, synthetic construct
  source 1..20: mol_type = other RNA
tcccgctctggtccttcctc

SEQ ID NO: 10204 - RNA, 20 nt, synthetic construct
  source 1..20: mol_type = other RNA
tcccgggtgcgcaccccctt

SEQ ID NO: 10205 - RNA, 20 nt, synthetic construct
  source 1..20: mol_type = other RNA
tcccgtcgccgtaggccaaa

SEQ ID NO: 10206 - RNA, 20 nt, synthetic construct
  source 1..20: mol_type = other RNA
tcccttagactggagagctg

SEQ ID NO: 10207 - RNA, 20 nt, synthetic construct
  source 1..20: mol_type = other RNA
tcccttctccaagttctcct

SEQ ID NO: 10208 - RNA, 20 nt, synthetic construct
  source 1..20: mol_type = other RNA
tccgccatagataactacta

SEQ ID NO: 10209 - RNA, 20 nt, synthetic construct
  source 1..20: mol_type = other RNA
tccgctctttcgcggggcct

SEQ ID NO: 10210 - RNA, 20 nt, synthetic construct
  source 1..20: mol_type = other RNA
tccggtggctgaggcgggag

SEQ ID NO: 10211 - RNA, 20 nt, synthetic construct
  source 1..20: mol_type = other RNA
tccgtagttgagaccagcct

SEQ ID NO: 10212 - RNA, 20 nt, synthetic construct
  source 1..20: mol_type = other RNA
tccgtgacttcccttctcca

SEQ ID NO: 10213 - RNA, 20 nt, synthetic construct
  source 1..20: mol_type = other RNA
tcctaccctcccgctctggt

SEQ ID NO: 10214 - RNA, 20 nt, synthetic construct
  source 1..20: mol_type = other RNA
tcctagcacctctgggtcta

SEQ ID NO: 10215 - RNA, 20 nt, synthetic construct
  source 1..20: mol_type = other RNA
tcctccccacggtgtggccc

SEQ ID NO: 10216 - RNA, 20 nt, synthetic construct
  source 1..20: mol_type = other RNA
tcctcccgcctcagccaccg

SEQ ID NO: 10217 - RNA, 20 nt, synthetic construct
  source 1..20: mol_type = other RNA
tcctctcccgctctgcaccc

SEQ ID NO: 10218 - RNA, 20 nt, synthetic construct
  source 1..20: mol_type = other RNA
tcctctttggctctttgcct

SEQ ID NO: 10219 - RNA, 20 nt, synthetic construct
  source 1..20: mol_type = other RNA
tccttcctctcccgctctgc

SEQ ID NO: 10220 - RNA, 20 nt, synthetic construct
  source 1..20: mol_type = other RNA
tccttggcacacagaaagat

SEQ ID NO: 10221 - RNA, 20 nt, synthetic construct
  source 1..20: mol_type = other RNA
tccttggtggcccgccgtgg

SEQ ID NO: 10222 - RNA, 20 nt, synthetic construct
  source 1..20: mol_type = other RNA
tcgaaaccgctttgtatcac

SEQ ID NO: 10223 - RNA, 20 nt, synthetic construct
  source 1..20: mol_type = other RNA
tcgacgccctaaactttgtc

SEQ ID NO: 10224 - RNA, 20 nt, synthetic construct
  source 1..20: mol_type = other RNA
tcgagattgaagtcaagcct

SEQ ID NO: 10225 - RNA, 20 nt, synthetic construct
  source 1..20: mol_type = other RNA
tcgataagcgtcagagcgcc

SEQ ID NO: 10226 - RNA, 20 nt, synthetic construct
  source 1..20: mol_type = other RNA
tcgattgctgccatttatcc

SEQ ID NO: 10227 - RNA, 20 nt, synthetic construct
  source 1..20: mol_type = other RNA
tcgcatgtcctagcacctct

SEQ ID NO: 10228 - RNA, 20 nt, synthetic construct
  source 1..20: mol_type = other RNA
tcgcccgggtaagcctgtct

SEQ ID NO: 10229 - RNA, 20 nt, synthetic construct
  source 1..20: mol_type = other RNA
tcgccgtaggccaaaggtct

SEQ ID NO: 10230 - RNA, 20 nt, synthetic construct
  source 1..20: mol_type = other RNA
tcgcggggcctctggctccc

SEQ ID NO: 10231 - RNA, 20 nt, synthetic construct
  source 1..20: mol_type = other RNA
tcgcgtgctgtttcctcccc

SEQ ID NO: 10232 - RNA, 20 nt, synthetic construct
  source 1..20: mol_type = other RNA
tcgctccgtgacttcccttc

SEQ ID NO: 10233 - RNA, 20 nt, synthetic construct
  source 1..20: mol_type = other RNA
tcgctctgttgcccacgctg

SEQ ID NO: 10234 - RNA, 20 nt, synthetic construct
  source 1..20: mol_type = other RNA
tcgctgtgctctctcgctcc

SEQ ID NO: 10235 - RNA, 20 nt, synthetic construct
  source 1..20: mol_type = other RNA
tcggcgctctgacgcttatc

SEQ ID NO: 10236 - RNA, 20 nt, synthetic construct
  source 1..20: mol_type = other RNA
tcggcggggagcaggggaga

SEQ ID NO: 10237 - RNA, 20 nt, synthetic construct
  source 1..20: mol_type = other RNA
tcgggacaaagtttagggcg

SEQ ID NO: 10238 - RNA, 20 nt, synthetic construct
  source 1..20: mol_type = other RNA
tcggggaagcggcggggtgg

SEQ ID NO: 10239 - RNA, 20 nt, synthetic construct
  source 1..20: mol_type = other RNA
tcggtgccttagtttcttca

SEQ ID NO: 10240 - RNA, 20 nt, synthetic construct
  source 1..20: mol_type = other RNA
tcggttttgaaaacatgagg

SEQ ID NO: 10241 - RNA, 20 nt, synthetic construct
  source 1..20: mol_type = other RNA
tcgtacagagggcttcctct

SEQ ID NO: 10242 - RNA, 20 nt, synthetic construct
  source 1..20: mol_type = other RNA
tcgtcccaaaggcgcggcgc

SEQ ID NO: 10243 - RNA, 20 nt, synthetic construct
  source 1..20: mol_type = other RNA
tcgtctaggcgcccgctaag

SEQ ID NO: 10244 - RNA, 20 nt, synthetic construct
  source 1..20: mol_type = other RNA
tcgtgcctgtggtcccagct

SEQ ID NO: 10245 - RNA, 20 nt, synthetic construct
  source 1..20: mol_type = other RNA
tctaagggaagcagagccgc

SEQ ID NO: 10246 - RNA, 20 nt, synthetic construct
  source 1..20: mol_type = other RNA
tctacaaacgtcgcgtgctg

SEQ ID NO: 10247 - RNA, 20 nt, synthetic construct
  source 1..20: mol_type = other RNA
tctaggcgcccgctaagttc

SEQ ID NO: 10248 - RNA, 20 nt, synthetic construct
  source 1..20: mol_type = other RNA
tctatggcggaagataactg

SEQ ID NO: 10249 - RNA, 20 nt, synthetic construct
  source 1..20: mol_type = other RNA
tctatgtggggccacaccgt

SEQ ID NO: 10250 - RNA, 20 nt, synthetic construct
  source 1..20: mol_type = other RNA
tctcaactacggacctcaag

SEQ ID NO: 10251 - RNA, 20 nt, synthetic construct
  source 1..20: mol_type = other RNA
tctcacagatgaagaaacta

SEQ ID NO: 10252 - RNA, 20 nt, synthetic construct
  source 1..20: mol_type = other RNA
tctcacgcagaaggcaggcg

SEQ ID NO: 10253 - RNA, 20 nt, synthetic construct
  source 1..20: mol_type = other RNA
tctccaagttctccttggtg

SEQ ID NO: 10254 - RNA, 20 nt, synthetic construct
  source 1..20: mol_type = other RNA
tctccagagcaaactgggcg

SEQ ID NO: 10255 - RNA, 20 nt, synthetic construct
  source 1..20: mol_type = other RNA
tctccagtctaagggaagca

SEQ ID NO: 10256 - RNA, 20 nt, synthetic construct
  source 1..20: mol_type = other RNA
tctcccctgctccccgccga

SEQ ID NO: 10257 - RNA, 20 nt, synthetic construct
  source 1..20: mol_type = other RNA
tctcccgctctgcaccctct

SEQ ID NO: 10258 - RNA, 20 nt, synthetic construct
  source 1..20: mol_type = other RNA
tctcctaccctcccgctctg

SEQ ID NO: 10259 - RNA, 20 nt, synthetic construct
  source 1..20: mol_type = other RNA
tctccttggtggcccgccgt

SEQ ID NO: 10260 - RNA, 20 nt, synthetic construct
  source 1..20: mol_type = other RNA
tctcgattgctgccatttat

SEQ ID NO: 10261 - RNA, 20 nt, synthetic construct
  source 1..20: mol_type = other RNA
tctcgctccgtgacttccct

SEQ ID NO: 10262 - RNA, 20 nt, synthetic construct
  source 1..20: mol_type = other RNA
tctcggggaagcggcggggt

SEQ ID NO: 10263 - RNA, 20 nt, synthetic construct
  source 1..20: mol_type = other RNA
tctcggtgccttagtttctt

SEQ ID NO: 10264 - RNA, 20 nt, synthetic construct
  source 1..20: mol_type = other RNA
tctctcctaccctcccgctc

SEQ ID NO: 10265 - RNA, 20 nt, synthetic construct
  source 1..20: mol_type = other RNA
tctctcgctccgtgacttcc

SEQ ID NO: 10266 - RNA, 20 nt, synthetic construct
  source 1..20: mol_type = other RNA
tctcttccgctctttcgcgg

SEQ ID NO: 10267 - RNA, 20 nt, synthetic construct
  source 1..20: mol_type = other RNA
tctcttgagcttaggctttt

SEQ ID NO: 10268 - RNA, 20 nt, synthetic construct
  source 1..20: mol_type = other RNA
tctgacgcttatcgacgccc

SEQ ID NO: 10269 - RNA, 20 nt, synthetic construct
  source 1..20: mol_type = other RNA
tctgcaccctctgtggccct

SEQ ID NO: 10270 - RNA, 20 nt, synthetic construct
  source 1..20: mol_type = other RNA
tctgcctctcacagatgaag

SEQ ID NO: 10271 - RNA, 20 nt, synthetic construct
  source 1..20: mol_type = other RNA
tctgcgtgagattctccaga

SEQ ID NO: 10272 - RNA, 20 nt, synthetic construct
  source 1..20: mol_type = other RNA
tctgctgcggctctgcttcc

SEQ ID NO: 10273 - RNA, 20 nt, synthetic construct
  source 1..20: mol_type = other RNA
tctgcttcccttagactgga

SEQ ID NO: 10274 - RNA, 20 nt, synthetic construct
  source 1..20: mol_type = other RNA
tctggagaatctcacgcaga

SEQ ID NO: 10275 - RNA, 20 nt, synthetic construct
  source 1..20: mol_type = other RNA
tctggctcccccagcgcagc

SEQ ID NO: 10276 - RNA, 20 nt, synthetic construct
  source 1..20: mol_type = other RNA
tctgggggaggcgtcgcccg

SEQ ID NO: 10277 - RNA, 20 nt, synthetic construct
  source 1..20: mol_type = other RNA
tctgggtctatgtggggcca

SEQ ID NO: 10278 - RNA, 20 nt, synthetic construct
  source 1..20: mol_type = other RNA
tctggtccttcctctcccgc

SEQ ID NO: 10279 - RNA, 20 nt, synthetic construct
  source 1..20: mol_type = other RNA
tctgtacgaaaagaccacag

SEQ ID NO: 10280 - RNA, 20 nt, synthetic construct
  source 1..20: mol_type = other RNA
tctgtgagaggcagaagata

SEQ ID NO: 10281 - RNA, 20 nt, synthetic construct
  source 1..20: mol_type = other RNA
tctgtggccctcgctgtgct

SEQ ID NO: 10282 - RNA, 20 nt, synthetic construct
  source 1..20: mol_type = other RNA
tctgtgtgccaaggacttta

SEQ ID NO: 10283 - RNA, 20 nt, synthetic construct
  source 1..20: mol_type = other RNA
tcttaaaatctcggtgcctt

SEQ ID NO: 10284 - RNA, 20 nt, synthetic construct
  source 1..20: mol_type = other RNA
tcttactttcggttttgaaa

SEQ ID NO: 10285 - RNA, 20 nt, synthetic construct
  source 1..20: mol_type = other RNA
tcttcatctgtgagaggcag

SEQ ID NO: 10286 - RNA, 20 nt, synthetic construct
  source 1..20: mol_type = other RNA
tcttccgccatagataacta

SEQ ID NO: 10287 - RNA, 20 nt, synthetic construct
  source 1..20: mol_type = other RNA
tcttccgctctttcgcgggg

SEQ ID NO: 10288 - RNA, 20 nt, synthetic construct
  source 1..20: mol_type = other RNA
tcttctgcctctcacagatg

SEQ ID NO: 10289 - RNA, 20 nt, synthetic construct
  source 1..20: mol_type = other RNA
tcttgagcttaggcttttga

SEQ ID NO: 10290 - RNA, 20 nt, synthetic construct
  source 1..20: mol_type = other RNA
tcttggaaacaaccaggcaa

SEQ ID NO: 10291 - RNA, 20 nt, synthetic construct
  source 1..20: mol_type = other RNA
tctttcgcggggcctctggc

SEQ ID NO: 10292 - RNA, 20 nt, synthetic construct
  source 1..20: mol_type = other RNA
tctttctgtgtgccaaggac

SEQ ID NO: 10293 - RNA, 20 nt, synthetic construct
  source 1..20: mol_type = other RNA
tctttgcctggttgtttcca

SEQ ID NO: 10294 - RNA, 20 nt, synthetic construct
  source 1..20: mol_type = other RNA
tctttggctctttgcctggt

SEQ ID NO: 10295 - RNA, 20 nt, synthetic construct
  source 1..20: mol_type = other RNA
tcttttcgtacagagggctt

SEQ ID NO: 10296 - RNA, 20 nt, synthetic construct
  source 1..20: mol_type = other RNA
tgaaaacagttatcttccgc

SEQ ID NO: 10297 - RNA, 20 nt, synthetic construct
  source 1..20: mol_type = other RNA
tgaaaacatgagggggttgg

SEQ ID NO: 10298 - RNA, 20 nt, synthetic construct
  source 1..20: mol_type = other RNA
tgaacgcgtggaggggcgct

SEQ ID NO: 10299 - RNA, 20 nt, synthetic construct
  source 1..20: mol_type = other RNA
tgaagaaactaaggcaccga

SEQ ID NO: 10300 - RNA, 20 nt, synthetic construct
  source 1..20: mol_type = other RNA
tgaagcctggtctctacaaa

SEQ ID NO: 10301 - RNA, 20 nt, synthetic construct
  source 1..20: mol_type = other RNA
tgaagtcaagcctaaccagg

SEQ ID NO: 10302 - RNA, 20 nt, synthetic construct
  source 1..20: mol_type = other RNA
tgacatctttctgtgtgcca

SEQ ID NO: 10303 - RNA, 20 nt, synthetic construct
  source 1..20: mol_type = other RNA
tgacatgtgatgggaacaaa

SEQ ID NO: 10304 - RNA, 20 nt, synthetic construct
  source 1..20: mol_type = other RNA
tgacgcaaagcacataaagt

SEQ ID NO: 10305 - RNA, 20 nt, synthetic construct
  source 1..20: mol_type = other RNA
tgacgcttatcgacgcccta

SEQ ID NO: 10306 - RNA, 20 nt, synthetic construct
  source 1..20: mol_type = other RNA
tgacttcaatctcgattgct

SEQ ID NO: 10307 - RNA, 20 nt, synthetic construct
  source 1..20: mol_type = other RNA
tgacttcccttctccaagtt

SEQ ID NO: 10308 - RNA, 20 nt, synthetic construct
  source 1..20: mol_type = other RNA
tgagaggcagaagataacca

SEQ ID NO: 10309 - RNA, 20 nt, synthetic construct
  source 1..20: mol_type = other RNA
tgagattctccagagcaaac

SEQ ID NO: 10310 - RNA, 20 nt, synthetic construct
  source 1..20: mol_type = other RNA
tgagctatcatggcgccagt

SEQ ID NO: 10311 - RNA, 20 nt, synthetic construct
  source 1..20: mol_type = other RNA
tgagcttaggcttttgagct

SEQ ID NO: 10312 - RNA, 20 nt, synthetic construct
  source 1..20: mol_type = other RNA
tgagggggttgggcgtggta

SEQ ID NO: 10313 - RNA, 20 nt, synthetic construct
  source 1..20: mol_type = other RNA
tgaggtccgtagttgagacc

SEQ ID NO: 10314 - RNA, 20 nt, synthetic construct
  source 1..20: mol_type = other RNA
tgaggtttgtgaacgcgtgg

SEQ ID NO: 10315 - RNA, 20 nt, synthetic construct
  source 1..20: mol_type = other RNA
tgagtctctcctaccctccc

SEQ ID NO: 10316 - RNA, 20 nt, synthetic construct
  source 1..20: mol_type = other RNA
tgatacaaagcggtttcgaa

SEQ ID NO: 10317 - RNA, 20 nt, synthetic construct
  source 1..20: mol_type = other RNA
tgatagctcaaaagcctaag

SEQ ID NO: 10318 - RNA, 20 nt, synthetic construct
  source 1..20: mol_type = other RNA
tgatgggaacaaataagtta

SEQ ID NO: 10319 - RNA, 20 nt, synthetic construct
  source 1..20: mol_type = other RNA
tgcaccctctgtggccctcg

SEQ ID NO: 10320 - RNA, 20 nt, synthetic construct
  source 1..20: mol_type = other RNA
tgcacgaattacagccaaaa

SEQ ID NO: 10321 - RNA, 20 nt, synthetic construct
  source 1..20: mol_type = other RNA
tgcactggcgccatgatagc

SEQ ID NO: 10322 - RNA, 20 nt, synthetic construct
  source 1..20: mol_type = other RNA
tgcagagcgggagaggaagg

SEQ ID NO: 10323 - RNA, 20 nt, synthetic construct
  source 1..20: mol_type = other RNA
tgccaaggactttatgtgct

SEQ ID NO: 10324 - RNA, 20 nt, synthetic construct
  source 1..20: mol_type = other RNA
tgccatttatcccctgtgta

SEQ ID NO: 10325 - RNA, 20 nt, synthetic construct
  source 1..20: mol_type = other RNA
tgcccacgctggagtgcact

SEQ ID NO: 10326 - RNA, 20 nt, synthetic construct
  source 1..20: mol_type = other RNA
tgcccctttcggcggggagc

SEQ ID NO: 10327 - RNA, 20 nt, synthetic construct
  source 1..20: mol_type = other RNA
tgccgcccagtttgctctgg

SEQ ID NO: 10328 - RNA, 20 nt, synthetic construct
  source 1..20: mol_type = other RNA
tgcctctcacagatgaagaa

SEQ ID NO: 10329 - RNA, 20 nt, synthetic construct
  source 1..20: mol_type = other RNA
tgcctcttactttcggtttt

SEQ ID NO: 10330 - RNA, 20 nt, synthetic construct
  source 1..20: mol_type = other RNA
tgcctggttgtttccaagat

SEQ ID NO: 10331 - RNA, 20 nt, synthetic construct
  source 1..20: mol_type = other RNA
tgcctgtggtcccagctgct

SEQ ID NO: 10332 - RNA, 20 nt, synthetic construct
  source 1..20: mol_type = other RNA
tgccttagtttcttcatctg

SEQ ID NO: 10333 - RNA, 20 nt, synthetic construct
  source 1..20: mol_type = other RNA
tgccttctgcgtgagattct

SEQ ID NO: 10334 - RNA, 20 nt, synthetic construct
  source 1..20: mol_type = other RNA
tgccttttggctgtaattcg

SEQ ID NO: 10335 - RNA, 20 nt, synthetic construct
  source 1..20: mol_type = other RNA
tgcgaacttagcgggcgcct

SEQ ID NO: 10336 - RNA, 20 nt, synthetic construct
  source 1..20: mol_type = other RNA
tgcgcacccccttccccact

SEQ ID NO: 10337 - RNA, 20 nt, synthetic construct
  source 1..20: mol_type = other RNA
tgcgctcccgcaaaagccct

SEQ ID NO: 10338 - RNA, 20 nt, synthetic construct
  source 1..20: mol_type = other RNA
tgcgctgggggagccagagg

SEQ ID NO: 10339 - RNA, 20 nt, synthetic construct
  source 1..20: mol_type = other RNA
tgcggctctgcttcccttag

SEQ ID NO: 10340 - RNA, 20 nt, synthetic construct
  source 1..20: mol_type = other RNA
tgcgggagcgcatgcctttt

SEQ ID NO: 10341 - RNA, 20 nt, synthetic construct
  source 1..20: mol_type = other RNA
tgcgtcatttaattttgaaa

SEQ ID NO: 10342 - RNA, 20 nt, synthetic construct
  source 1..20: mol_type = other RNA
tgcgtgagattctccagagc

SEQ ID NO: 10343 - RNA, 20 nt, synthetic construct
  source 1..20: mol_type = other RNA
tgctaggacatgcgaactta

SEQ ID NO: 10344 - RNA, 20 nt, synthetic construct
  source 1..20: mol_type = other RNA
tgctccccgccgaaaggggc

SEQ ID NO: 10345 - RNA, 20 nt, synthetic construct
  source 1..20: mol_type = other RNA
tgctccggtggctgaggcgg

SEQ ID NO: 10346 - RNA, 20 nt, synthetic construct
  source 1..20: mol_type = other RNA
tgctctctcgctccgtgact

SEQ ID NO: 10347 - RNA, 20 nt, synthetic construct
  source 1..20: mol_type = other RNA
tgctctggagaatctcacgc

SEQ ID NO: 10348 - RNA, 20 nt, synthetic construct
  source 1..20: mol_type = other RNA
tgctgccatttatcccctgt

SEQ ID NO: 10349 - RNA, 20 nt, synthetic construct
  source 1..20: mol_type = other RNA
tgctgcggctctgcttccct

SEQ ID NO: 10350 - RNA, 20 nt, synthetic construct
  source 1..20: mol_type = other RNA
tgctgtttcctccccacggt

SEQ ID NO: 10351 - RNA, 20 nt, synthetic construct
  source 1..20: mol_type = other RNA
tgcttcccttagactggaga

SEQ ID NO: 10352 - RNA, 20 nt, synthetic construct
  source 1..20: mol_type = other RNA
tgcttggctgtgatacaaag

SEQ ID NO: 10353 - RNA, 20 nt, synthetic construct
  source 1..20: mol_type = other RNA
tgctttgcgtcatttaattt

SEQ ID NO: 10354 - RNA, 20 nt, synthetic construct
  source 1..20: mol_type = other RNA
tggaaacaaccaggcaaaga

SEQ ID NO: 10355 - RNA, 20 nt, synthetic construct
  source 1..20: mol_type = other RNA
tggactagccccacggcggg

SEQ ID NO: 10356 - RNA, 20 nt, synthetic construct
  source 1..20: mol_type = other RNA
tggacttcgtctaggcgccc

SEQ ID NO: 10357 - RNA, 20 nt, synthetic construct
  source 1..20: mol_type = other RNA
tggagaagggaagtcacgga

SEQ ID NO: 10358 - RNA, 20 nt, synthetic construct
  source 1..20: mol_type = other RNA
tggagaatctcacgcagaag

SEQ ID NO: 10359 - RNA, 20 nt, synthetic construct
  source 1..20: mol_type = other RNA
tggagagctgtggacttcgt

SEQ ID NO: 10360 - RNA, 20 nt, synthetic construct
  source 1..20: mol_type = other RNA
tggaggggcgcttggggtct

SEQ ID NO: 10361 - RNA, 20 nt, synthetic construct
  source 1..20: mol_type = other RNA
tggagtgcactggcgccatg

SEQ ID NO: 10362 - RNA, 20 nt, synthetic construct
  source 1..20: mol_type = other RNA
tggagtgggggacgggtagg

SEQ ID NO: 10363 - RNA, 20 nt, synthetic construct
  source 1..20: mol_type = other RNA
tggatctcggggaagcggcg

SEQ ID NO: 10364 - RNA, 20 nt, synthetic construct
  source 1..20: mol_type = other RNA
tggcacacagaaagatgtca

SEQ ID NO: 10365 - RNA, 20 nt, synthetic construct
  source 1..20: mol_type = other RNA
tggcagcaatcgagattgaa

SEQ ID NO: 10366 - RNA, 20 nt, synthetic construct
  source 1..20: mol_type = other RNA
tggccaggctggtctcaact

SEQ ID NO: 10367 - RNA, 20 nt, synthetic construct
  source 1..20: mol_type = other RNA
tggccccacatagacccaga

SEQ ID NO: 10368 - RNA, 20 nt, synthetic construct
  source 1..20: mol_type = other RNA
tggcccgccgtggggctagt

SEQ ID NO: 10369 - RNA, 20 nt, synthetic construct
  source 1..20: mol_type = other RNA
tggccctcgctgtgctctct

SEQ ID NO: 10370 - RNA, 20 nt, synthetic construct
  source 1..20: mol_type = other RNA
tggcctacggcgacgggagg

SEQ ID NO: 10371 - RNA, 20 nt, synthetic construct
  source 1..20: mol_type = other RNA
tggcctgggagtggggaagg

SEQ ID NO: 10372 - RNA, 20 nt, synthetic construct
  source 1..20: mol_type = other RNA
tggcgccagtgcactccagc

SEQ ID NO: 10373 - RNA, 20 nt, synthetic construct
  source 1..20: mol_type = other RNA
tggcgccatgatagctcaaa

SEQ ID NO: 10374 - RNA, 20 nt, synthetic construct
  source 1..20: mol_type = other RNA
tggcggaagataactgtttt

SEQ ID NO: 10375 - RNA, 20 nt, synthetic construct
  source 1..20: mol_type = other RNA
tggctcccccagcgcagctg

SEQ ID NO: 10376 - RNA, 20 nt, synthetic construct
  source 1..20: mol_type = other RNA
tggctcgtgcctgtggtccc

SEQ ID NO: 10377 - RNA, 20 nt, synthetic construct
  source 1..20: mol_type = other RNA
tggctctttgcctggttgtt

SEQ ID NO: 10378 - RNA, 20 nt, synthetic construct
  source 1..20: mol_type = other RNA
tggctgtaattcgtgcattt

SEQ ID NO: 10379 - RNA, 20 nt, synthetic construct
  source 1..20: mol_type = other RNA
tggctgtgatacaaagcggt

SEQ ID NO: 10380 - RNA, 20 nt, synthetic construct
  source 1..20: mol_type = other RNA
tggcttgaggtccgtagttg

SEQ ID NO: 10381 - RNA, 20 nt, synthetic construct
  source 1..20: mol_type = other RNA
tgggaacaaataagttaatt

SEQ ID NO: 10382 - RNA, 20 nt, synthetic construct
  source 1..20: mol_type = other RNA
tgggacgagcctacccgtcc

SEQ ID NO: 10383 - RNA, 20 nt, synthetic construct
  source 1..20: mol_type = other RNA
tgggagtggggaagggggtg

SEQ ID NO: 10384 - RNA, 20 nt, synthetic construct
  source 1..20: mol_type = other RNA
tgggccctgtggtcttttcg

SEQ ID NO: 10385 - RNA, 20 nt, synthetic construct
  source 1..20: mol_type = other RNA
tgggcggcatgggccctgtg

SEQ ID NO: 10386 - RNA, 20 nt, synthetic construct
  source 1..20: mol_type = other RNA
tggggaagggggtgcgcacc

SEQ ID NO: 10387 - RNA, 20 nt, synthetic construct
  source 1..20: mol_type = other RNA
tggggaggaaacagcacgcg

SEQ ID NO: 10388 - RNA, 20 nt, synthetic construct
  source 1..20: mol_type = other RNA
tggggccacaccgtggggag

SEQ ID NO: 10389 - RNA, 20 nt, synthetic construct
  source 1..20: mol_type = other RNA
tggggctagtccagggctgg

SEQ ID NO: 10390 - RNA, 20 nt, synthetic construct
  source 1..20: mol_type = other RNA
tgggggacgggtaggctcgt

SEQ ID NO: 10391 - RNA, 20 nt, synthetic construct
  source 1..20: mol_type = other RNA
tgggggagccagaggccccg

SEQ ID NO: 10392 - RNA, 20 nt, synthetic construct
  source 1..20: mol_type = other RNA
tgggggagggtttctcttcc

SEQ ID NO: 10393 - RNA, 20 nt, synthetic construct
  source 1..20: mol_type = other RNA
tggggtctgggggaggcgtc

SEQ ID NO: 10394 - RNA, 20 nt, synthetic construct
  source 1..20: mol_type = other RNA
tgggtctatgtggggccaca

SEQ ID NO: 10395 - RNA, 20 nt, synthetic construct
  source 1..20: mol_type = other RNA
tggtcccagctgctccggtg

SEQ ID NO: 10396 - RNA, 20 nt, synthetic construct
  source 1..20: mol_type = other RNA
tggtccttcctctcccgctc

SEQ ID NO: 10397 - RNA, 20 nt, synthetic construct
  source 1..20: mol_type = other RNA
tggtctcaactacggacctc

SEQ ID NO: 10398 - RNA, 20 nt, synthetic construct
  source 1..20: mol_type = other RNA
tggtctctacaaaaaataat

SEQ ID NO: 10399 - RNA, 20 nt, synthetic construct
  source 1..20: mol_type = other RNA
tggtcttttcgtacagaggg

SEQ ID NO: 10400 - RNA, 20 nt, synthetic construct
  source 1..20: mol_type = other RNA
tggtgaagcctggtctctac

SEQ ID NO: 10401 - RNA, 20 nt, synthetic construct
  source 1..20: mol_type = other RNA
tggtggcccgccgtggggct

SEQ ID NO: 10402 - RNA, 20 nt, synthetic construct
  source 1..20: mol_type = other RNA
tggtggctcgtgcctgtggt

SEQ ID NO: 10403 - RNA, 20 nt, synthetic construct
  source 1..20: mol_type = other RNA
tggttaggcttgacttcaat

SEQ ID NO: 10404 - RNA, 20 nt, synthetic construct
  source 1..20: mol_type = other RNA
tggttatcttctgcctctca

SEQ ID NO: 10405 - RNA, 20 nt, synthetic construct
  source 1..20: mol_type = other RNA
tggttgtttccaagatgtac

SEQ ID NO: 10406 - RNA, 20 nt, synthetic construct
  source 1..20: mol_type = other RNA
tgtacgaaaagaccacaggg

SEQ ID NO: 10407 - RNA, 20 nt, synthetic construct
  source 1..20: mol_type = other RNA
tgtactgtgcctcttacttt

SEQ ID NO: 10408 - RNA, 20 nt, synthetic construct
  source 1..20: mol_type = other RNA
tgtagaatgcttggctgtga

SEQ ID NO: 10409 - RNA, 20 nt, synthetic construct
  source 1..20: mol_type = other RNA
tgtagagaccaggcttcacc

SEQ ID NO: 10410 - RNA, 20 nt, synthetic construct
  source 1..20: mol_type = other RNA
tgtatcacagccaagcattc

SEQ ID NO: 10411 - RNA, 20 nt, synthetic construct
  source 1..20: mol_type = other RNA
tgtcaataacgggtagttct

SEQ ID NO: 10412 - RNA, 20 nt, synthetic construct
  source 1..20: mol_type = other RNA
tgtcccgaccctcccgtcgc

SEQ ID NO: 10413 - RNA, 20 nt, synthetic construct
  source 1..20: mol_type = other RNA
tgtcctagcacctctgggtc

SEQ ID NO: 10414 - RNA, 20 nt, synthetic construct
  source 1..20: mol_type = other RNA
tgtctgctgcggctctgctt

SEQ ID NO: 10415 - RNA, 20 nt, synthetic construct
  source 1..20: mol_type = other RNA
tgtgaacgcgtggaggggcg

SEQ ID NO: 10416 - RNA, 20 nt, synthetic construct
  source 1..20: mol_type = other RNA
tgtgagaggcagaagataac

SEQ ID NO: 10417 - RNA, 20 nt, synthetic construct
  source 1..20: mol_type = other RNA
tgtgatacaaagcggtttcg

SEQ ID NO: 10418 - RNA, 20 nt, synthetic construct
  source 1..20: mol_type = other RNA
tgtgatgggaacaaataagt

SEQ ID NO: 10419 - RNA, 20 nt, synthetic construct
  source 1..20: mol_type = other RNA
tgtgccaaggactttatgtg

SEQ ID NO: 10420 - RNA, 20 nt, synthetic construct
  source 1..20: mol_type = other RNA
tgtgcctcttactttcggtt

SEQ ID NO: 10421 - RNA, 20 nt, synthetic construct
  source 1..20: mol_type = other RNA
tgtgctctctcgctccgtga

SEQ ID NO: 10422 - RNA, 20 nt, synthetic construct
  source 1..20: mol_type = other RNA
tgtgctttgcgtcatttaat

SEQ ID NO: 10423 - RNA, 20 nt, synthetic construct
  source 1..20: mol_type = other RNA
tgtggacttcgtctaggcgc

SEQ ID NO: 10424 - RNA, 20 nt, synthetic construct
  source 1..20: mol_type = other RNA
tgtggccccacatagaccca

SEQ ID NO: 10425 - RNA, 20 nt, synthetic construct
  source 1..20: mol_type = other RNA
tgtggccctcgctgtgctct

SEQ ID NO: 10426 - RNA, 20 nt, synthetic construct
  source 1..20: mol_type = other RNA
tgtggggccacaccgtgggg

SEQ ID NO: 10427 - RNA, 20 nt, synthetic construct
  source 1..20: mol_type = other RNA
tgtggtcccagctgctccgg

SEQ ID NO: 10428 - RNA, 20 nt, synthetic construct
  source 1..20: mol_type = other RNA
tgtggtcttttcgtacagag

SEQ ID NO: 10429 - RNA, 20 nt, synthetic construct
  source 1..20: mol_type = other RNA
tgtgtgccaaggactttatg

SEQ ID NO: 10430 - RNA, 20 nt, synthetic construct
  source 1..20: mol_type = other RNA
tgttcccatcacatgtcact

SEQ ID NO: 10431 - RNA, 20 nt, synthetic construct
  source 1..20: mol_type = other RNA
tgttgcccacgctggagtgc

SEQ ID NO: 10432 - RNA, 20 nt, synthetic construct
  source 1..20: mol_type = other RNA
tgttggccaggctggtctca

SEQ ID NO: 10433 - RNA, 20 nt, synthetic construct
  source 1..20: mol_type = other RNA
tgtttccaagatgtactgtg

SEQ ID NO: 10434 - RNA, 20 nt, synthetic construct
  source 1..20: mol_type = other RNA
tgtttcctccccacggtgtg

SEQ ID NO: 10435 - RNA, 20 nt, synthetic construct
  source 1..20: mol_type = other RNA
tgttttcaaaaccgaaagta

SEQ ID NO: 10436 - RNA, 20 nt, synthetic construct
  source 1..20: mol_type = other RNA
ttaaaagtgacatgtgatgg

SEQ ID NO: 10437 - RNA, 20 nt, synthetic construct
  source 1..20: mol_type = other RNA
ttaaaatctcggtgccttag

SEQ ID NO: 10438 - RNA, 20 nt, synthetic construct
  source 1..20: mol_type = other RNA
ttaaatgacgcaaagcacat

SEQ ID NO: 10439 - RNA, 20 nt, synthetic construct
  source 1..20: mol_type = other RNA
ttaacttatttgttcccatc

SEQ ID NO: 10440 - RNA, 20 nt, synthetic construct
  source 1..20: mol_type = other RNA
ttaagaaaaacgcctgcctt

SEQ ID NO: 10441 - RNA, 20 nt, synthetic construct
  source 1..20: mol_type = other RNA
ttaagtttcttaaaatctcg

SEQ ID NO: 10442 - RNA, 20 nt, synthetic construct
  source 1..20: mol_type = other RNA
ttaattacacaggggataaa

SEQ ID NO: 10443 - RNA, 20 nt, synthetic construct
  source 1..20: mol_type = other RNA
ttaattattcgaaaccgctt

SEQ ID NO: 10444 - RNA, 20 nt, synthetic construct
  source 1..20: mol_type = other RNA
ttacacaggggataaatggc

SEQ ID NO: 10445 - RNA, 20 nt, synthetic construct
  source 1..20: mol_type = other RNA
ttacagccaaaaggcatgcg

SEQ ID NO: 10446 - RNA, 20 nt, synthetic construct
  source 1..20: mol_type = other RNA
ttacaggcgtaagctaccac

SEQ ID NO: 10447 - RNA, 20 nt, synthetic construct
  source 1..20: mol_type = other RNA
ttacccgggcgacgcctccc

SEQ ID NO: 10448 - RNA, 20 nt, synthetic construct
  source 1..20: mol_type = other RNA
ttactttcggttttgaaaac

SEQ ID NO: 10449 - RNA, 20 nt, synthetic construct
  source 1..20: mol_type = other RNA
ttagactggagagctgtgga

SEQ ID NO: 10450 - RNA, 20 nt, synthetic construct
  source 1..20: mol_type = other RNA
ttagcgggcgcctagacgaa

SEQ ID NO: 10451 - RNA, 20 nt, synthetic construct
  source 1..20: mol_type = other RNA
ttaggcttgacttcaatctc

SEQ ID NO: 10452 - RNA, 20 nt, synthetic construct
  source 1..20: mol_type = other RNA
ttaggcttttgagctatcat

SEQ ID NO: 10453 - RNA, 20 nt, synthetic construct
  source 1..20: mol_type = other RNA
ttagggaggccgaggcggga

SEQ ID NO: 10454 - RNA, 20 nt, synthetic construct
  source 1..20: mol_type = other RNA
ttagggcgtcgataagcgtc

SEQ ID NO: 10455 - RNA, 20 nt, synthetic construct
  source 1..20: mol_type = other RNA
ttagtttcttcatctgtgag

SEQ ID NO: 10456 - RNA, 20 nt, synthetic construct
  source 1..20: mol_type = other RNA
ttataagaactacccgttat

SEQ ID NO: 10457 - RNA, 20 nt, synthetic construct
  source 1..20: mol_type = other RNA
ttatcccctgtgtaattaag

SEQ ID NO: 10458 - RNA, 20 nt, synthetic construct
  source 1..20: mol_type = other RNA
ttatcgacgccctaaacttt

SEQ ID NO: 10459 - RNA, 20 nt, synthetic construct
  source 1..20: mol_type = other RNA
ttatctatggcggaagataa

SEQ ID NO: 10460 - RNA, 20 nt, synthetic construct
  source 1..20: mol_type = other RNA
ttatcttccgccatagataa

SEQ ID NO: 10461 - RNA, 20 nt, synthetic construct
  source 1..20: mol_type = other RNA
ttatcttctgcctctcacag

SEQ ID NO: 10462 - RNA, 20 nt, synthetic construct
  source 1..20: mol_type = other RNA
ttatgtgctttgcgtcattt

SEQ ID NO: 10463 - RNA, 20 nt, synthetic construct
  source 1..20: mol_type = other RNA
ttattcgaaaccgctttgta

SEQ ID NO: 10464 - RNA, 20 nt, synthetic construct
  source 1..20: mol_type = other RNA
ttattgacatctttctgtgt

SEQ ID NO: 10465 - RNA, 20 nt, synthetic construct
  source 1..20: mol_type = other RNA
ttatttgttcccatcacatg

SEQ ID NO: 10466 - RNA, 20 nt, synthetic construct
  source 1..20: mol_type = other RNA
ttattttttgtagagaccag

SEQ ID NO: 10467 - RNA, 20 nt, synthetic construct
  source 1..20: mol_type = other RNA
ttcaaaaccgaaagtaagag

SEQ ID NO: 10468 - RNA, 20 nt, synthetic construct
  source 1..20: mol_type = other RNA
ttcaaaattaaatgacgcaa

SEQ ID NO: 10469 - RNA, 20 nt, synthetic construct
  source 1..20: mol_type = other RNA
ttcaatctcgattgctgcca

SEQ ID NO: 10470 - RNA, 20 nt, synthetic construct
  source 1..20: mol_type = other RNA
ttcacaaacctcagcgccgc

SEQ ID NO: 10471 - RNA, 20 nt, synthetic construct
  source 1..20: mol_type = other RNA
ttcatctgtgagaggcagaa

SEQ ID NO: 10472 - RNA, 20 nt, synthetic construct
  source 1..20: mol_type = other RNA
ttccaagatgtactgtgcct

SEQ ID NO: 10473 - RNA, 20 nt, synthetic construct
  source 1..20: mol_type = other RNA
ttcccatcacatgtcacttt

SEQ ID NO: 10474 - RNA, 20 nt, synthetic construct
  source 1..20: mol_type = other RNA
ttccccactcccaggccacc

SEQ ID NO: 10475 - RNA, 20 nt, synthetic construct
  source 1..20: mol_type = other RNA
ttccccgagatccagccctg

SEQ ID NO: 10476 - RNA, 20 nt, synthetic construct
  source 1..20: mol_type = other RNA
ttcccttagactggagagct

SEQ ID NO: 10477 - RNA, 20 nt, synthetic construct
  source 1..20: mol_type = other RNA
ttcccttctccaagttctcc

SEQ ID NO: 10478 - RNA, 20 nt, synthetic construct
  source 1..20: mol_type = other RNA
ttccgccatagataactact

SEQ ID NO: 10479 - RNA, 20 nt, synthetic construct
  source 1..20: mol_type = other RNA
ttccgctctttcgcggggcc

SEQ ID NO: 10480 - RNA, 20 nt, synthetic construct
  source 1..20: mol_type = other RNA
ttcctccccacggtgtggcc

SEQ ID NO: 10481 - RNA, 20 nt, synthetic construct
  source 1..20: mol_type = other RNA
ttcctctcccgctctgcacc

SEQ ID NO: 10482 - RNA, 20 nt, synthetic construct
  source 1..20: mol_type = other RNA
ttcctctttggctctttgcc

SEQ ID NO: 10483 - RNA, 20 nt, synthetic construct
  source 1..20: mol_type = other RNA
ttcgaaaccgctttgtatca

SEQ ID NO: 10484 - RNA, 20 nt, synthetic construct
  source 1..20: mol_type = other RNA
ttcgcatgtcctagcacctc

SEQ ID NO: 10485 - RNA, 20 nt, synthetic construct
  source 1..20: mol_type = other RNA
ttcgcggggcctctggctcc

SEQ ID NO: 10486 - RNA, 20 nt, synthetic construct
  source 1..20: mol_type = other RNA
ttcggcggggagcaggggag

SEQ ID NO: 10487 - RNA, 20 nt, synthetic construct
  source 1..20: mol_type = other RNA
ttcggttttgaaaacatgag

SEQ ID NO: 10488 - RNA, 20 nt, synthetic construct
  source 1..20: mol_type = other RNA
ttcgtacagagggcttcctc

SEQ ID NO: 10489 - RNA, 20 nt, synthetic construct
  source 1..20: mol_type = other RNA
ttcgtctaggcgcccgctaa

SEQ ID NO: 10490 - RNA, 20 nt, synthetic construct
  source 1..20: mol_type = other RNA
ttctacaaacgtcgcgtgct

SEQ ID NO: 10491 - RNA, 20 nt, synthetic construct
  source 1..20: mol_type = other RNA
ttctccaagttctccttggt

SEQ ID NO: 10492 - RNA, 20 nt, synthetic construct
  source 1..20: mol_type = other RNA
ttctccagagcaaactgggc

SEQ ID NO: 10493 - RNA, 20 nt, synthetic construct
  source 1..20: mol_type = other RNA
ttctccttggtggcccgccg

SEQ ID NO: 10494 - RNA, 20 nt, synthetic construct
  source 1..20: mol_type = other RNA
ttctcttccgctctttcgcg

SEQ ID NO: 10495 - RNA, 20 nt, synthetic construct
  source 1..20: mol_type = other RNA
ttctgcctctcacagatgaa

SEQ ID NO: 10496 - RNA, 20 nt, synthetic construct
  source 1..20: mol_type = other RNA
ttctgcgtgagattctccag

SEQ ID NO: 10497 - RNA, 20 nt, synthetic construct
  source 1..20: mol_type = other RNA
ttctgtgtgccaaggacttt

SEQ ID NO: 10498 - RNA, 20 nt, synthetic construct
  source 1..20: mol_type = other RNA
ttcttaaaatctcggtgcct

SEQ ID NO: 10499 - RNA, 20 nt, synthetic construct
  source 1..20: mol_type = other RNA
ttcttcatctgtgagaggca

SEQ ID NO: 10500 - RNA, 20 nt, synthetic construct
  source 1..20: mol_type = other RNA
ttgaaaacagttatcttccg

SEQ ID NO: 10501 - RNA, 20 nt, synthetic construct
  source 1..20: mol_type = other RNA
ttgaaaacatgagggggttg

SEQ ID NO: 10502 - RNA, 20 nt, synthetic construct
  source 1..20: mol_type = other RNA
ttgaagtcaagcctaaccag

SEQ ID NO: 10503 - RNA, 20 nt, synthetic construct
  source 1..20: mol_type = other RNA
ttgacatctttctgtgtgcc

SEQ ID NO: 10504 - RNA, 20 nt, synthetic construct
  source 1..20: mol_type = other RNA
ttgacttcaatctcgattgc

SEQ ID NO: 10505 - RNA, 20 nt, synthetic construct
  source 1..20: mol_type = other RNA
ttgagctatcatggcgccag

SEQ ID NO: 10506 - RNA, 20 nt, synthetic construct
  source 1..20: mol_type = other RNA
ttgagcttaggcttttgagc

SEQ ID NO: 10507 - RNA, 20 nt, synthetic construct
  source 1..20: mol_type = other RNA
ttgaggtccgtagttgagac

SEQ ID NO: 10508 - RNA, 20 nt, synthetic construct
  source 1..20: mol_type = other RNA
ttgcccacgctggagtgcac

SEQ ID NO: 10509 - RNA, 20 nt, synthetic construct
  source 1..20: mol_type = other RNA
ttgcccctttcggcggggag

SEQ ID NO: 10510 - RNA, 20 nt, synthetic construct
  source 1..20: mol_type = other RNA
ttgcctggttgtttccaaga

SEQ ID NO: 10511 - RNA, 20 nt, synthetic construct
  source 1..20: mol_type = other RNA
ttgcgggagcgcatgccttt

SEQ ID NO: 10512 - RNA, 20 nt, synthetic construct
  source 1..20: mol_type = other RNA
ttgcgtcatttaattttgaa

SEQ ID NO: 10513 - RNA, 20 nt, synthetic construct
  source 1..20: mol_type = other RNA
ttgctctggagaatctcacg

SEQ ID NO: 10514 - RNA, 20 nt, synthetic construct
  source 1..20: mol_type = other RNA
ttgctgccatttatcccctg

SEQ ID NO: 10515 - RNA, 20 nt, synthetic construct
  source 1..20: mol_type = other RNA
ttggaaacaaccaggcaaag

SEQ ID NO: 10516 - RNA, 20 nt, synthetic construct
  source 1..20: mol_type = other RNA
ttggagaagggaagtcacgg

SEQ ID NO: 10517 - RNA, 20 nt, synthetic construct
  source 1..20: mol_type = other RNA
ttggcacacagaaagatgtc

SEQ ID NO: 10518 - RNA, 20 nt, synthetic construct
  source 1..20: mol_type = other RNA
ttggccaggctggtctcaac

SEQ ID NO: 10519 - RNA, 20 nt, synthetic construct
  source 1..20: mol_type = other RNA
ttggcctacggcgacgggag

SEQ ID NO: 10520 - RNA, 20 nt, synthetic construct
  source 1..20: mol_type = other RNA
ttggctctttgcctggttgt

SEQ ID NO: 10521 - RNA, 20 nt, synthetic construct
  source 1..20: mol_type = other RNA
ttggctgtaattcgtgcatt

SEQ ID NO: 10522 - RNA, 20 nt, synthetic construct
  source 1..20: mol_type = other RNA
ttggctgtgatacaaagcgg

SEQ ID NO: 10523 - RNA, 20 nt, synthetic construct
  source 1..20: mol_type = other RNA
ttgggacgagcctacccgtc

SEQ ID NO: 10524 - RNA, 20 nt, synthetic construct
  source 1..20: mol_type = other RNA
ttgggcgtggtagcttacgc

SEQ ID NO: 10525 - RNA, 20 nt, synthetic construct
  source 1..20: mol_type = other RNA
ttgggggagggtttctcttc

SEQ ID NO: 10526 - RNA, 20 nt, synthetic construct
  source 1..20: mol_type = other RNA
ttggggtctgggggaggcgt

SEQ ID NO: 10527 - RNA, 20 nt, synthetic construct
  source 1..20: mol_type = other RNA
ttggtggcccgccgtggggc

SEQ ID NO: 10528 - RNA, 20 nt, synthetic construct
  source 1..20: mol_type = other RNA
ttgtagaatgcttggctgtg

SEQ ID NO: 10529 - RNA, 20 nt, synthetic construct
  source 1..20: mol_type = other RNA
ttgtagagaccaggcttcac

SEQ ID NO: 10530 - RNA, 20 nt, synthetic construct
  source 1..20: mol_type = other RNA
ttgtatcacagccaagcatt

SEQ ID NO: 10531 - RNA, 20 nt, synthetic construct
  source 1..20: mol_type = other RNA
ttgtcccgaccctcccgtcg

SEQ ID NO: 10532 - RNA, 20 nt, synthetic construct
  source 1..20: mol_type = other RNA
ttgtgaacgcgtggaggggc

SEQ ID NO: 10533 - RNA, 20 nt, synthetic construct
  source 1..20: mol_type = other RNA
ttgttcccatcacatgtcac

SEQ ID NO: 10534 - RNA, 20 nt, synthetic construct
  source 1..20: mol_type = other RNA
ttgtttccaagatgtactgt

SEQ ID NO: 10535 - RNA, 20 nt, synthetic construct
  source 1..20: mol_type = other RNA
tttaaaagtgacatgtgatg

SEQ ID NO: 10536 - RNA, 20 nt, synthetic construct
  source 1..20: mol_type = other RNA
tttaagaaaaacgcctgcct

SEQ ID NO: 10537 - RNA, 20 nt, synthetic construct
  source 1..20: mol_type = other RNA
tttagggcgtcgataagcgt

SEQ ID NO: 10538 - RNA, 20 nt, synthetic construct
  source 1..20: mol_type = other RNA
tttatcccctgtgtaattaa

SEQ ID NO: 10539 - RNA, 20 nt, synthetic construct
  source 1..20: mol_type = other RNA
tttatgtgctttgcgtcatt

SEQ ID NO: 10540 - RNA, 20 nt, synthetic construct
  source 1..20: mol_type = other RNA
tttcaaaaccgaaagtaaga

SEQ ID NO: 10541 - RNA, 20 nt, synthetic construct
  source 1..20: mol_type = other RNA
tttcaaaattaaatgacgca

SEQ ID NO: 10542 - RNA, 20 nt, synthetic construct
  source 1..20: mol_type = other RNA
tttccaagatgtactgtgcc

SEQ ID NO: 10543 - RNA, 20 nt, synthetic construct
  source 1..20: mol_type = other RNA
tttcctccccacggtgtggc

SEQ ID NO: 10544 - RNA, 20 nt, synthetic construct
  source 1..20: mol_type = other RNA
tttcgcggggcctctggctc

SEQ ID NO: 10545 - RNA, 20 nt, synthetic construct
  source 1..20: mol_type = other RNA
tttcggcggggagcagggga

SEQ ID NO: 10546 - RNA, 20 nt, synthetic construct
  source 1..20: mol_type = other RNA
tttcggttttgaaaacatga

SEQ ID NO: 10547 - RNA, 20 nt, synthetic construct
  source 1..20: mol_type = other RNA
tttcgtacagagggcttcct

SEQ ID NO: 10548 - RNA, 20 nt, synthetic construct
  source 1..20: mol_type = other RNA
tttctcttccgctctttcgc

SEQ ID NO: 10549 - RNA, 20 nt, synthetic construct
  source 1..20: mol_type = other RNA
tttctgtgtgccaaggactt

SEQ ID NO: 10550 - RNA, 20 nt, synthetic construct
  source 1..20: mol_type = other RNA
tttcttaaaatctcggtgcc

SEQ ID NO: 10551 - RNA, 20 nt, synthetic construct
  source 1..20: mol_type = other RNA
tttcttcatctgtgagaggc

SEQ ID NO: 10552 - RNA, 20 nt, synthetic construct
  source 1..20: mol_type = other RNA
tttgaaaacagttatcttcc

SEQ ID NO: 10553 - RNA, 20 nt, synthetic construct
  source 1..20: mol_type = other RNA
tttgaaaacatgagggggtt

SEQ ID NO: 10554 - RNA, 20 nt, synthetic construct
  source 1..20: mol_type = other RNA
tttgagctatcatggcgcca

SEQ ID NO: 10555 - RNA, 20 nt, synthetic construct
  source 1..20: mol_type = other RNA
tttgcctggttgtttccaag

SEQ ID NO: 10556 - RNA, 20 nt, synthetic construct
  source 1..20: mol_type = other RNA
tttgcgggagcgcatgcctt

SEQ ID NO: 10557 - RNA, 20 nt, synthetic construct
  source 1..20: mol_type = other RNA
tttgcgtcatttaattttga

SEQ ID NO: 10558 - RNA, 20 nt, synthetic construct
  source 1..20: mol_type = other RNA
tttgctctggagaatctcac

SEQ ID NO: 10559 - RNA, 20 nt, synthetic construct
  source 1..20: mol_type = other RNA
tttggcctacggcgacggga

SEQ ID NO: 10560 - RNA, 20 nt, synthetic construct
  source 1..20: mol_type = other RNA
tttggctctttgcctggttg

SEQ ID NO: 10561 - RNA, 20 nt, synthetic construct
  source 1..20: mol_type = other RNA
tttggctgtaattcgtgcat

SEQ ID NO: 10562 - RNA, 20 nt, synthetic construct
  source 1..20: mol_type = other RNA
tttgggacgagcctacccgt

SEQ ID NO: 10563 - RNA, 20 nt, synthetic construct
  source 1..20: mol_type = other RNA
tttgtagaatgcttggctgt

SEQ ID NO: 10564 - RNA, 20 nt, synthetic construct
  source 1..20: mol_type = other RNA
tttgtagagaccaggcttca

SEQ ID NO: 10565 - RNA, 20 nt, synthetic construct
  source 1..20: mol_type = other RNA
tttgtatcacagccaagcat

SEQ ID NO: 10566 - RNA, 20 nt, synthetic construct
  source 1..20: mol_type = other RNA
tttgtcccgaccctcccgtc

SEQ ID NO: 10567 - RNA, 20 nt, synthetic construct
  source 1..20: mol_type = other RNA
tttgtgaacgcgtggagggg

SEQ ID NO: 10568 - RNA, 20 nt, synthetic construct
  source 1..20: mol_type = other RNA
tttgttcccatcacatgtca

SEQ ID NO: 10569 - RNA, 20 nt, synthetic construct
  source 1..20: mol_type = other RNA
ttttaaaagtgacatgtgat

SEQ ID NO: 10570 - RNA, 20 nt, synthetic construct
  source 1..20: mol_type = other RNA
ttttaagaaaaacgcctgcc

SEQ ID NO: 10571 - RNA, 20 nt, synthetic construct
  source 1..20: mol_type = other RNA
ttttcaaaaccgaaagtaag

SEQ ID NO: 10572 - RNA, 20 nt, synthetic construct
  source 1..20: mol_type = other RNA
ttttcaaaattaaatgacgc

SEQ ID NO: 10573 - RNA, 20 nt, synthetic construct
  source 1..20: mol_type = other RNA
ttttcgtacagagggcttcc

SEQ ID NO: 10574 - RNA, 20 nt, synthetic construct
  source 1..20: mol_type = other RNA
ttttgaaaacagttatcttc

SEQ ID NO: 10575 - RNA, 20 nt, synthetic construct
  source 1..20: mol_type = other RNA
ttttgaaaacatgagggggt

SEQ ID NO: 10576 - RNA, 20 nt, synthetic construct
  source 1..20: mol_type = other RNA
ttttgagctatcatggcgcc

SEQ ID NO: 10577 - RNA, 20 nt, synthetic construct
  source 1..20: mol_type = other RNA
ttttgcgggagcgcatgcct

SEQ ID NO: 10578 - RNA, 20 nt, synthetic construct
  source 1..20: mol_type = other RNA
ttttggctgtaattcgtgca

SEQ ID NO: 10579 - RNA, 20 nt, synthetic construct
  source 1..20: mol_type = other RNA
ttttgtagagaccaggcttc

SEQ ID NO: 10580 - RNA, 20 nt, synthetic construct
  source 1..20: mol_type = other RNA
tttttaaaagtgacatgtga

SEQ ID NO: 10581 - RNA, 20 nt, synthetic construct
  source 1..20: mol_type = other RNA
tttttaagaaaaacgcctgc

SEQ ID NO: 10582 - RNA, 20 nt, synthetic construct
  source 1..20: mol_type = other RNA
tttttgtagagaccaggctt

SEQ ID NO: 10583 - RNA, 20 nt, synthetic construct
  source 1..20: mol_type = other RNA
ttttttaaaagtgacatgtg

SEQ ID NO: 10584 - RNA, 20 nt, synthetic construct
  source 1..20: mol_type = other RNA
ttttttaagaaaaacgcctg

SEQ ID NO: 10585 - RNA, 20 nt, synthetic construct
  source 1..20: mol_type = other RNA
ttttttgtagagaccaggct

SEQ ID NO: 10586 - RNA, 21 nt, synthetic construct
  source 1..21: mol_type = other RNA
aaaaaatgcacgaattacagc

SEQ ID NO: 10587 - RNA, 21 nt, synthetic construct
  source 1..21: mol_type = other RNA
aaaaacgcctgccttctgcgt

SEQ ID NO: 10588 - RNA, 21 nt, synthetic construct
  source 1..21: mol_type = other RNA
aaaaatgcacgaattacagcc

SEQ ID NO: 10589 - RNA, 21 nt, synthetic construct
  source 1..21: mol_type = other RNA
aaaaattataagaactacccg

SEQ ID NO: 10590 - RNA, 21 nt, synthetic construct
  source 1..21: mol_type = other RNA
aaaacagttatcttccgccat

SEQ ID NO: 10591 - RNA, 21 nt, synthetic construct
  source 1..21: mol_type = other RNA
aaaacatgagggggttgggcg

SEQ ID NO: 10592 - RNA, 21 nt, synthetic construct
  source 1..21: mol_type = other RNA
aaaaccgaaagtaagaggcac

SEQ ID NO: 10593 - RNA, 21 nt, synthetic construct
  source 1..21: mol_type = other RNA
aaaacgcctgccttctgcgtg

SEQ ID NO: 10594 - RNA, 21 nt, synthetic construct
  source 1..21: mol_type = other RNA
aaaagaccacagggcccatgc

SEQ ID NO: 10595 - RNA, 21 nt, synthetic construct
  source 1..21: mol_type = other RNA
aaaagccctggttaggcttga

SEQ ID NO: 10596 - RNA, 21 nt, synthetic construct
  source 1..21: mol_type = other RNA
aaaagcctaagctcaagagat

SEQ ID NO: 10597 - RNA, 21 nt, synthetic construct
  source 1..21: mol_type = other RNA
aaaaggcatgcgctcccgcaa

SEQ ID NO: 10598 - RNA, 21 nt, synthetic construct
  source 1..21: mol_type = other RNA
aaaagtgacatgtgatgggaa

SEQ ID NO: 10599 - RNA, 21 nt, synthetic construct
  source 1..21: mol_type = other RNA
aaaatctcggtgccttagttt

SEQ ID NO: 10600 - RNA, 21 nt, synthetic construct
  source 1..21: mol_type = other RNA
aaaatgcacgaattacagcca

SEQ ID NO: 10601 - RNA, 21 nt, synthetic construct
  source 1..21: mol_type = other RNA
aaaattaaatgacgcaaagca

SEQ ID NO: 10602 - RNA, 21 nt, synthetic construct
  source 1..21: mol_type = other RNA
aaaattataagaactacccgt

SEQ ID NO: 10603 - RNA, 21 nt, synthetic construct
  source 1..21: mol_type = other RNA
aaacaaccaggcaaagagcca

SEQ ID NO: 10604 - RNA, 21 nt, synthetic construct
  source 1..21: mol_type = other RNA
aaacagcacgcgacgtttgta

SEQ ID NO: 10605 - RNA, 21 nt, synthetic construct
  source 1..21: mol_type = other RNA
aaacagttatcttccgccata

SEQ ID NO: 10606 - RNA, 21 nt, synthetic construct
  source 1..21: mol_type = other RNA
aaacatgagggggttgggcgt

SEQ ID NO: 10607 - RNA, 21 nt, synthetic construct
  source 1..21: mol_type = other RNA
aaaccctcccccaacctcggc

SEQ ID NO: 10608 - RNA, 21 nt, synthetic construct
  source 1..21: mol_type = other RNA
aaaccgaaagtaagaggcaca

SEQ ID NO: 10609 - RNA, 21 nt, synthetic construct
  source 1..21: mol_type = other RNA
aaaccgctttgtatcacagcc

SEQ ID NO: 10610 - RNA, 21 nt, synthetic construct
  source 1..21: mol_type = other RNA
aaacctcagcgccgcgccttt

SEQ ID NO: 10611 - RNA, 21 nt, synthetic construct
  source 1..21: mol_type = other RNA
aaacgcctgccttctgcgtga

SEQ ID NO: 10612 - RNA, 21 nt, synthetic construct
  source 1..21: mol_type = other RNA
aaacgtcgcgtgctgtttcct

SEQ ID NO: 10613 - RNA, 21 nt, synthetic construct
  source 1..21: mol_type = other RNA
aaactaaggcaccgagatttt

SEQ ID NO: 10614 - RNA, 21 nt, synthetic construct
  source 1..21: mol_type = other RNA
aaactgggcggcatgggccct

SEQ ID NO: 10615 - RNA, 21 nt, synthetic construct
  source 1..21: mol_type = other RNA
aaacttaattacacaggggat

SEQ ID NO: 10616 - RNA, 21 nt, synthetic construct
  source 1..21: mol_type = other RNA
aaactttgtcccgaccctccc

SEQ ID NO: 10617 - RNA, 21 nt, synthetic construct
  source 1..21: mol_type = other RNA
aaagaccacagggcccatgcc

SEQ ID NO: 10618 - RNA, 21 nt, synthetic construct
  source 1..21: mol_type = other RNA
aaagagccaaagaggaagccc

SEQ ID NO: 10619 - RNA, 21 nt, synthetic construct
  source 1..21: mol_type = other RNA
aaagagcggaagagaaaccct

SEQ ID NO: 10620 - RNA, 21 nt, synthetic construct
  source 1..21: mol_type = other RNA
aaagaggaagccctctgtacg

SEQ ID NO: 10621 - RNA, 21 nt, synthetic construct
  source 1..21: mol_type = other RNA
aaagatgtcaataacgggtag

SEQ ID NO: 10622 - RNA, 21 nt, synthetic construct
  source 1..21: mol_type = other RNA
aaagcacataaagtccttggc

SEQ ID NO: 10623 - RNA, 21 nt, synthetic construct
  source 1..21: mol_type = other RNA
aaagccctggttaggcttgac

SEQ ID NO: 10624 - RNA, 21 nt, synthetic construct
  source 1..21: mol_type = other RNA
aaagcctaagctcaagagatc

SEQ ID NO: 10625 - RNA, 21 nt, synthetic construct
  source 1..21: mol_type = other RNA
aaagcggtttcgaataattaa

SEQ ID NO: 10626 - RNA, 21 nt, synthetic construct
  source 1..21: mol_type = other RNA
aaaggcatgcgctcccgcaaa

SEQ ID NO: 10627 - RNA, 21 nt, synthetic construct
  source 1..21: mol_type = other RNA
aaaggcgcggcgctgaggttt

SEQ ID NO: 10628 - RNA, 21 nt, synthetic construct
  source 1..21: mol_type = other RNA
aaaggggcaagtagcgcgcgt

SEQ ID NO: 10629 - RNA, 21 nt, synthetic construct
  source 1..21: mol_type = other RNA
aaaggtctcccctgctccccg

SEQ ID NO: 10630 - RNA, 21 nt, synthetic construct
  source 1..21: mol_type = other RNA
aaagtaagaggcacagtacat

SEQ ID NO: 10631 - RNA, 21 nt, synthetic construct
  source 1..21: mol_type = other RNA
aaagtccttggcacacagaaa

SEQ ID NO: 10632 - RNA, 21 nt, synthetic construct
  source 1..21: mol_type = other RNA
aaagtgacatgtgatgggaac

SEQ ID NO: 10633 - RNA, 21 nt, synthetic construct
  source 1..21: mol_type = other RNA
aaagtttagggcgtcgataag

SEQ ID NO: 10634 - RNA, 21 nt, synthetic construct
  source 1..21: mol_type = other RNA
aaatctcggtgccttagtttc

SEQ ID NO: 10635 - RNA, 21 nt, synthetic construct
  source 1..21: mol_type = other RNA
aaatgacgcaaagcacataaa

SEQ ID NO: 10636 - RNA, 21 nt, synthetic construct
  source 1..21: mol_type = other RNA
aaatgcacgaattacagccaa

SEQ ID NO: 10637 - RNA, 21 nt, synthetic construct
  source 1..21: mol_type = other RNA
aaatggcagcaatcgagattg

SEQ ID NO: 10638 - RNA, 21 nt, synthetic construct
  source 1..21: mol_type = other RNA
aaattaaatgacgcaaagcac

SEQ ID NO: 10639 - RNA, 21 nt, synthetic construct
  source 1..21: mol_type = other RNA
aaattataagaactacccgtt

SEQ ID NO: 10640 - RNA, 21 nt, synthetic construct
  source 1..21: mol_type = other RNA
aacaaaaattagccgggtgtg

SEQ ID NO: 10641 - RNA, 21 nt, synthetic construct
  source 1..21: mol_type = other RNA
aacaaccaggcaaagagccaa

SEQ ID NO: 10642 - RNA, 21 nt, synthetic construct
  source 1..21: mol_type = other RNA
aacagcacgcgacgtttgtag

SEQ ID NO: 10643 - RNA, 21 nt, synthetic construct
  source 1..21: mol_type = other RNA
aacagttatcttccgccatag

SEQ ID NO: 10644 - RNA, 21 nt, synthetic construct
  source 1..21: mol_type = other RNA
aacatgagggggttgggcgtg

SEQ ID NO: 10645 - RNA, 21 nt, synthetic construct
  source 1..21: mol_type = other RNA
aacatggtgaagcctggtctc

SEQ ID NO: 10646 - RNA, 21 nt, synthetic construct
  source 1..21: mol_type = other RNA
aaccaggcaaagagccaaaga

SEQ ID NO: 10647 - RNA, 21 nt, synthetic construct
  source 1..21: mol_type = other RNA
aaccagggcttttgcgggagc

SEQ ID NO: 10648 - RNA, 21 nt, synthetic construct
  source 1..21: mol_type = other RNA
aaccatagtagttatctatgg

SEQ ID NO: 10649 - RNA, 21 nt, synthetic construct
  source 1..21: mol_type = other RNA
aaccccctcatgttttcaaaa

SEQ ID NO: 10650 - RNA, 21 nt, synthetic construct
  source 1..21: mol_type = other RNA
aaccctcccccaacctcggcg

SEQ ID NO: 10651 - RNA, 21 nt, synthetic construct
  source 1..21: mol_type = other RNA
aaccgaaagtaagaggcacag

SEQ ID NO: 10652 - RNA, 21 nt, synthetic construct
  source 1..21: mol_type = other RNA
aaccgctttgtatcacagcca

SEQ ID NO: 10653 - RNA, 21 nt, synthetic construct
  source 1..21: mol_type = other RNA
aacctcagcgccgcgcctttg

SEQ ID NO: 10654 - RNA, 21 nt, synthetic construct
  source 1..21: mol_type = other RNA
aacctcggcgctctgacgctt

SEQ ID NO: 10655 - RNA, 21 nt, synthetic construct
  source 1..21: mol_type = other RNA
aacgcctgccttctgcgtgag

SEQ ID NO: 10656 - RNA, 21 nt, synthetic construct
  source 1..21: mol_type = other RNA
aacgcgtggaggggcgcttgg

SEQ ID NO: 10657 - RNA, 21 nt, synthetic construct
  source 1..21: mol_type = other RNA
aacgggtagttcttataattt

SEQ ID NO: 10658 - RNA, 21 nt, synthetic construct
  source 1..21: mol_type = other RNA
aacgtcgcgtgctgtttcctc

SEQ ID NO: 10659 - RNA, 21 nt, synthetic construct
  source 1..21: mol_type = other RNA
aactaaggcaccgagatttta

SEQ ID NO: 10660 - RNA, 21 nt, synthetic construct
  source 1..21: mol_type = other RNA
aactacccgttattgacatct

SEQ ID NO: 10661 - RNA, 21 nt, synthetic construct
  source 1..21: mol_type = other RNA
aactacggacctcaagccatc

SEQ ID NO: 10662 - RNA, 21 nt, synthetic construct
  source 1..21: mol_type = other RNA
aactactatggttatcttctg

SEQ ID NO: 10663 - RNA, 21 nt, synthetic construct
  source 1..21: mol_type = other RNA
aactgggcggcatgggccctg

SEQ ID NO: 10664 - RNA, 21 nt, synthetic construct
  source 1..21: mol_type = other RNA
aacttaattacacaggggata

SEQ ID NO: 10665 - RNA, 21 nt, synthetic construct
  source 1..21: mol_type = other RNA
aacttagcgggcgcctagacg

SEQ ID NO: 10666 - RNA, 21 nt, synthetic construct
  source 1..21: mol_type = other RNA
aacttatttgttcccatcaca

SEQ ID NO: 10667 - RNA, 21 nt, synthetic construct
  source 1..21: mol_type = other RNA
aacttggagaagggaagtcac

SEQ ID NO: 10668 - RNA, 21 nt, synthetic construct
  source 1..21: mol_type = other RNA
aactttgtcccgaccctcccg

SEQ ID NO: 10669 - RNA, 21 nt, synthetic construct
  source 1..21: mol_type = other RNA
aagaaaaacgcctgccttctg

SEQ ID NO: 10670 - RNA, 21 nt, synthetic construct
  source 1..21: mol_type = other RNA
aagaaactaaggcaccgagat

SEQ ID NO: 10671 - RNA, 21 nt, synthetic construct
  source 1..21: mol_type = other RNA
aagaaacttaattacacaggg

SEQ ID NO: 10672 - RNA, 21 nt, synthetic construct
  source 1..21: mol_type = other RNA
aagaactacccgttattgaca

SEQ ID NO: 10673 - RNA, 21 nt, synthetic construct
  source 1..21: mol_type = other RNA
aagaccacagggcccatgccg

SEQ ID NO: 10674 - RNA, 21 nt, synthetic construct
  source 1..21: mol_type = other RNA
aagagaaaccctcccccaacc

SEQ ID NO: 10675 - RNA, 21 nt, synthetic construct
  source 1..21: mol_type = other RNA
aagagatcctcccgcctcagc

SEQ ID NO: 10676 - RNA, 21 nt, synthetic construct
  source 1..21: mol_type = other RNA
aagagccaaagaggaagccct

SEQ ID NO: 10677 - RNA, 21 nt, synthetic construct
  source 1..21: mol_type = other RNA
aagagcggaagagaaaccctc

SEQ ID NO: 10678 - RNA, 21 nt, synthetic construct
  source 1..21: mol_type = other RNA
aagaggaagccctctgtacga

SEQ ID NO: 10679 - RNA, 21 nt, synthetic construct
  source 1..21: mol_type = other RNA
aagaggcacagtacatcttgg

SEQ ID NO: 10680 - RNA, 21 nt, synthetic construct
  source 1..21: mol_type = other RNA
aagataaccatagtagttatc

SEQ ID NO: 10681 - RNA, 21 nt, synthetic construct
  source 1..21: mol_type = other RNA
aagatgtactgtgcctcttac

SEQ ID NO: 10682 - RNA, 21 nt, synthetic construct
  source 1..21: mol_type = other RNA
aagatgtcaataacgggtagt

SEQ ID NO: 10683 - RNA, 21 nt, synthetic construct
  source 1..21: mol_type = other RNA
aagcacataaagtccttggca

SEQ ID NO: 10684 - RNA, 21 nt, synthetic construct
  source 1..21: mol_type = other RNA
aagcagagccgcagcagacag

SEQ ID NO: 10685 - RNA, 21 nt, synthetic construct
  source 1..21: mol_type = other RNA
aagcattctacaaacgtcgcg

SEQ ID NO: 10686 - RNA, 21 nt, synthetic construct
  source 1..21: mol_type = other RNA
aagccatcctcccgcctcggc

SEQ ID NO: 10687 - RNA, 21 nt, synthetic construct
  source 1..21: mol_type = other RNA
aagccctctgtacgaaaagac

SEQ ID NO: 10688 - RNA, 21 nt, synthetic construct
  source 1..21: mol_type = other RNA
aagccctggttaggcttgact

SEQ ID NO: 10689 - RNA, 21 nt, synthetic construct
  source 1..21: mol_type = other RNA
aagcctaaccagggcttttgc

SEQ ID NO: 10690 - RNA, 21 nt, synthetic construct
  source 1..21: mol_type = other RNA
aagcctaagctcaagagatcc

SEQ ID NO: 10691 - RNA, 21 nt, synthetic construct
  source 1..21: mol_type = other RNA
aagcctggtctctacaaaaaa

SEQ ID NO: 10692 - RNA, 21 nt, synthetic construct
  source 1..21: mol_type = other RNA
aagcctgtctgctgcggctct

SEQ ID NO: 10693 - RNA, 21 nt, synthetic construct
  source 1..21: mol_type = other RNA
aagcgcccctccacgcgttca

SEQ ID NO: 10694 - RNA, 21 nt, synthetic construct
  source 1..21: mol_type = other RNA
aagcggcggggtggcctggga

SEQ ID NO: 10695 - RNA, 21 nt, synthetic construct
  source 1..21: mol_type = other RNA
aagcggtttcgaataattaac

SEQ ID NO: 10696 - RNA, 21 nt, synthetic construct
  source 1..21: mol_type = other RNA
aagcgtcagagcgccgaggtt

SEQ ID NO: 10697 - RNA, 21 nt, synthetic construct
  source 1..21: mol_type = other RNA
aagctaccacgcccaaccccc

SEQ ID NO: 10698 - RNA, 21 nt, synthetic construct
  source 1..21: mol_type = other RNA
aagctcaagagatcctcccgc

SEQ ID NO: 10699 - RNA, 21 nt, synthetic construct
  source 1..21: mol_type = other RNA
aaggaccagagcgggagggta

SEQ ID NO: 10700 - RNA, 21 nt, synthetic construct
  source 1..21: mol_type = other RNA
aaggactttatgtgctttgcg

SEQ ID NO: 10701 - RNA, 21 nt, synthetic construct
  source 1..21: mol_type = other RNA
aaggagaacttggagaaggga

SEQ ID NO: 10702 - RNA, 21 nt, synthetic construct
  source 1..21: mol_type = other RNA
aaggcaccgagattttaagaa

SEQ ID NO: 10703 - RNA, 21 nt, synthetic construct
  source 1..21: mol_type = other RNA
aaggcaggcgtttttcttaaa

SEQ ID NO: 10704 - RNA, 21 nt, synthetic construct
  source 1..21: mol_type = other RNA
aaggcatgcgctcccgcaaaa

SEQ ID NO: 10705 - RNA, 21 nt, synthetic construct
  source 1..21: mol_type = other RNA
aaggcgcggcgctgaggtttg

SEQ ID NO: 10706 - RNA, 21 nt, synthetic construct
  source 1..21: mol_type = other RNA
aagggaagcagagccgcagca

SEQ ID NO: 10707 - RNA, 21 nt, synthetic construct
  source 1..21: mol_type = other RNA
aagggaagtcacggagcgaga

SEQ ID NO: 10708 - RNA, 21 nt, synthetic construct
  source 1..21: mol_type = other RNA
aaggggcaagtagcgcgcgtc

SEQ ID NO: 10709 - RNA, 21 nt, synthetic construct
  source 1..21: mol_type = other RNA
aagggggtgcgcacccgggac

SEQ ID NO: 10710 - RNA, 21 nt, synthetic construct
  source 1..21: mol_type = other RNA
aaggtctcccctgctccccgc

SEQ ID NO: 10711 - RNA, 21 nt, synthetic construct
  source 1..21: mol_type = other RNA
aagtaagaggcacagtacatc

SEQ ID NO: 10712 - RNA, 21 nt, synthetic construct
  source 1..21: mol_type = other RNA
aagtagcgcgcgtcccgggtg

SEQ ID NO: 10713 - RNA, 21 nt, synthetic construct
  source 1..21: mol_type = other RNA
aagtcaagcctaaccagggct

SEQ ID NO: 10714 - RNA, 21 nt, synthetic construct
  source 1..21: mol_type = other RNA
aagtcacggagcgagagagca

SEQ ID NO: 10715 - RNA, 21 nt, synthetic construct
  source 1..21: mol_type = other RNA
aagtccacagctctccagtct

SEQ ID NO: 10716 - RNA, 21 nt, synthetic construct
  source 1..21: mol_type = other RNA
aagtccttggcacacagaaag

SEQ ID NO: 10717 - RNA, 21 nt, synthetic construct
  source 1..21: mol_type = other RNA
aagtgacatgtgatgggaaca

SEQ ID NO: 10718 - RNA, 21 nt, synthetic construct
  source 1..21: mol_type = other RNA
aagttaattattcgaaaccgc

SEQ ID NO: 10719 - RNA, 21 nt, synthetic construct
  source 1..21: mol_type = other RNA
aagttcgcatgtcctagcacc

SEQ ID NO: 10720 - RNA, 21 nt, synthetic construct
  source 1..21: mol_type = other RNA
aagttctccttggtggcccgc

SEQ ID NO: 10721 - RNA, 21 nt, synthetic construct
  source 1..21: mol_type = other RNA
aagtttagggcgtcgataagc

SEQ ID NO: 10722 - RNA, 21 nt, synthetic construct
  source 1..21: mol_type = other RNA
aagtttcttaaaatctcggtg

SEQ ID NO: 10723 - RNA, 21 nt, synthetic construct
  source 1..21: mol_type = other RNA
aataacgggtagttcttataa

SEQ ID NO: 10724 - RNA, 21 nt, synthetic construct
  source 1..21: mol_type = other RNA
aatcgagattgaagtcaagcc

SEQ ID NO: 10725 - RNA, 21 nt, synthetic construct
  source 1..21: mol_type = other RNA
aatctcacgcagaaggcaggc

SEQ ID NO: 10726 - RNA, 21 nt, synthetic construct
  source 1..21: mol_type = other RNA
aatctcgattgctgccattta

SEQ ID NO: 10727 - RNA, 21 nt, synthetic construct
  source 1..21: mol_type = other RNA
aatctcggtgccttagtttct

SEQ ID NO: 10728 - RNA, 21 nt, synthetic construct
  source 1..21: mol_type = other RNA
aatgacgcaaagcacataaag

SEQ ID NO: 10729 - RNA, 21 nt, synthetic construct
  source 1..21: mol_type = other RNA
aatgcacgaattacagccaaa

SEQ ID NO: 10730 - RNA, 21 nt, synthetic construct
  source 1..21: mol_type = other RNA
aatgcttggctgtgatacaaa

SEQ ID NO: 10731 - RNA, 21 nt, synthetic construct
  source 1..21: mol_type = other RNA
aatggcagcaatcgagattga

SEQ ID NO: 10732 - RNA, 21 nt, synthetic construct
  source 1..21: mol_type = other RNA
aattaaatgacgcaaagcaca

SEQ ID NO: 10733 - RNA, 21 nt, synthetic construct
  source 1..21: mol_type = other RNA
aattacacaggggataaatgg

SEQ ID NO: 10734 - RNA, 21 nt, synthetic construct
  source 1..21: mol_type = other RNA
aattacagccaaaaggcatgc

SEQ ID NO: 10735 - RNA, 21 nt, synthetic construct
  source 1..21: mol_type = other RNA
aattataagaactacccgtta

SEQ ID NO: 10736 - RNA, 21 nt, synthetic construct
  source 1..21: mol_type = other RNA
aattattcgaaaccgctttgt

SEQ ID NO: 10737 - RNA, 21 nt, synthetic construct
  source 1..21: mol_type = other RNA
acaaacctcagcgccgcgcct

SEQ ID NO: 10738 - RNA, 21 nt, synthetic construct
  source 1..21: mol_type = other RNA
acaaacgtcgcgtgctgtttc

SEQ ID NO: 10739 - RNA, 21 nt, synthetic construct
  source 1..21: mol_type = other RNA
acaaagcggtttcgaataatt

SEQ ID NO: 10740 - RNA, 21 nt, synthetic construct
  source 1..21: mol_type = other RNA
acaaagtttagggcgtcgata

SEQ ID NO: 10741 - RNA, 21 nt, synthetic construct
  source 1..21: mol_type = other RNA
acaaccaggcaaagagccaaa

SEQ ID NO: 10742 - RNA, 21 nt, synthetic construct
  source 1..21: mol_type = other RNA
acacagaaagatgtcaataac

SEQ ID NO: 10743 - RNA, 21 nt, synthetic construct
  source 1..21: mol_type = other RNA
acacaggggataaatggcagc

SEQ ID NO: 10744 - RNA, 21 nt, synthetic construct
  source 1..21: mol_type = other RNA
acacccggctaatttttgtta

SEQ ID NO: 10745 - RNA, 21 nt, synthetic construct
  source 1..21: mol_type = other RNA
acaccgtggggaggaaacagc

SEQ ID NO: 10746 - RNA, 21 nt, synthetic construct
  source 1..21: mol_type = other RNA
acagaaagatgtcaataacgg

SEQ ID NO: 10747 - RNA, 21 nt, synthetic construct
  source 1..21: mol_type = other RNA
acagagggcttcctctttggc

SEQ ID NO: 10748 - RNA, 21 nt, synthetic construct
  source 1..21: mol_type = other RNA
acagagggtgcagagcgggag

SEQ ID NO: 10749 - RNA, 21 nt, synthetic construct
  source 1..21: mol_type = other RNA
acagatgaagaaactaaggca

SEQ ID NO: 10750 - RNA, 21 nt, synthetic construct
  source 1..21: mol_type = other RNA
acagcacgcgacgtttgtaga

SEQ ID NO: 10751 - RNA, 21 nt, synthetic construct
  source 1..21: mol_type = other RNA
acagccaaaaggcatgcgctc

SEQ ID NO: 10752 - RNA, 21 nt, synthetic construct
  source 1..21: mol_type = other RNA
acagccaagcattctacaaac

SEQ ID NO: 10753 - RNA, 21 nt, synthetic construct
  source 1..21: mol_type = other RNA
acagcgagggccacagagggt

SEQ ID NO: 10754 - RNA, 21 nt, synthetic construct
  source 1..21: mol_type = other RNA
acagctctccagtctaaggga

SEQ ID NO: 10755 - RNA, 21 nt, synthetic construct
  source 1..21: mol_type = other RNA
acaggcgtaagctaccacgcc

SEQ ID NO: 10756 - RNA, 21 nt, synthetic construct
  source 1..21: mol_type = other RNA
acaggcttacccgggcgacgc

SEQ ID NO: 10757 - RNA, 21 nt, synthetic construct
  source 1..21: mol_type = other RNA
acagggcccatgccgcccagt

SEQ ID NO: 10758 - RNA, 21 nt, synthetic construct
  source 1..21: mol_type = other RNA
acaggggataaatggcagcaa

SEQ ID NO: 10759 - RNA, 21 nt, synthetic construct
  source 1..21: mol_type = other RNA
acagtacatcttggaaacaac

SEQ ID NO: 10760 - RNA, 21 nt, synthetic construct
  source 1..21: mol_type = other RNA
acagttatcttccgccataga

SEQ ID NO: 10761 - RNA, 21 nt, synthetic construct
  source 1..21: mol_type = other RNA
acataaagtccttggcacaca

SEQ ID NO: 10762 - RNA, 21 nt, synthetic construct
  source 1..21: mol_type = other RNA
acatagacccagaggtgctag

SEQ ID NO: 10763 - RNA, 21 nt, synthetic construct
  source 1..21: mol_type = other RNA
acatcttggaaacaaccaggc

SEQ ID NO: 10764 - RNA, 21 nt, synthetic construct
  source 1..21: mol_type = other RNA
acatctttctgtgtgccaagg

SEQ ID NO: 10765 - RNA, 21 nt, synthetic construct
  source 1..21: mol_type = other RNA
acatgagggggttgggcgtgg

SEQ ID NO: 10766 - RNA, 21 nt, synthetic construct
  source 1..21: mol_type = other RNA
acatgcgaacttagcgggcgc

SEQ ID NO: 10767 - RNA, 21 nt, synthetic construct
  source 1..21: mol_type = other RNA
acatggtgaagcctggtctct

SEQ ID NO: 10768 - RNA, 21 nt, synthetic construct
  source 1..21: mol_type = other RNA
acatgtgatgggaacaaataa

SEQ ID NO: 10769 - RNA, 21 nt, synthetic construct
  source 1..21: mol_type = other RNA
accaaggagaacttggagaag

SEQ ID NO: 10770 - RNA, 21 nt, synthetic construct
  source 1..21: mol_type = other RNA
accacacccggctaatttttg

SEQ ID NO: 10771 - RNA, 21 nt, synthetic construct
  source 1..21: mol_type = other RNA
accacaggcacgagccaccac

SEQ ID NO: 10772 - RNA, 21 nt, synthetic construct
  source 1..21: mol_type = other RNA
accacagggcccatgccgccc

SEQ ID NO: 10773 - RNA, 21 nt, synthetic construct
  source 1..21: mol_type = other RNA
accacgcccaaccccctcatg

SEQ ID NO: 10774 - RNA, 21 nt, synthetic construct
  source 1..21: mol_type = other RNA
accagagcgggagggtaggag

SEQ ID NO: 10775 - RNA, 21 nt, synthetic construct
  source 1..21: mol_type = other RNA
accaggcaaagagccaaagag

SEQ ID NO: 10776 - RNA, 21 nt, synthetic construct
  source 1..21: mol_type = other RNA
accagggcttttgcgggagcg

SEQ ID NO: 10777 - RNA, 21 nt, synthetic construct
  source 1..21: mol_type = other RNA
accatagtagttatctatggc

SEQ ID NO: 10778 - RNA, 21 nt, synthetic construct
  source 1..21: mol_type = other RNA
acccagaggtgctaggacatg

SEQ ID NO: 10779 - RNA, 21 nt, synthetic construct
  source 1..21: mol_type = other RNA
accccaagcgcccctccacgc

SEQ ID NO: 10780 - RNA, 21 nt, synthetic construct
  source 1..21: mol_type = other RNA
accccctcatgttttcaaaac

SEQ ID NO: 10781 - RNA, 21 nt, synthetic construct
  source 1..21: mol_type = other RNA
acccccttccccactcccagg

SEQ ID NO: 10782 - RNA, 21 nt, synthetic construct
  source 1..21: mol_type = other RNA
accccgccgcttccccgagat

SEQ ID NO: 10783 - RNA, 21 nt, synthetic construct
  source 1..21: mol_type = other RNA
acccggctaatttttgttatt

SEQ ID NO: 10784 - RNA, 21 nt, synthetic construct
  source 1..21: mol_type = other RNA
acccgggacgcgcgctacttg

SEQ ID NO: 10785 - RNA, 21 nt, synthetic construct
  source 1..21: mol_type = other RNA
acccgtcccccactccagctg

SEQ ID NO: 10786 - RNA, 21 nt, synthetic construct
  source 1..21: mol_type = other RNA
acccgttattgacatctttct

SEQ ID NO: 10787 - RNA, 21 nt, synthetic construct
  source 1..21: mol_type = other RNA
accctcccccaacctcggcgc

SEQ ID NO: 10788 - RNA, 21 nt, synthetic construct
  source 1..21: mol_type = other RNA
accctcccgctctggtccttc

SEQ ID NO: 10789 - RNA, 21 nt, synthetic construct
  source 1..21: mol_type = other RNA
accctcccgtcgccgtaggcc

SEQ ID NO: 10790 - RNA, 21 nt, synthetic construct
  source 1..21: mol_type = other RNA
accctctgtggccctcgctgt

SEQ ID NO: 10791 - RNA, 21 nt, synthetic construct
  source 1..21: mol_type = other RNA
accgaaagtaagaggcacagt

SEQ ID NO: 10792 - RNA, 21 nt, synthetic construct
  source 1..21: mol_type = other RNA
accgagattttaagaaactta

SEQ ID NO: 10793 - RNA, 21 nt, synthetic construct
  source 1..21: mol_type = other RNA
accgctttgtatcacagccaa

SEQ ID NO: 10794 - RNA, 21 nt, synthetic construct
  source 1..21: mol_type = other RNA
accggagcagctgggaccaca

SEQ ID NO: 10795 - RNA, 21 nt, synthetic construct
  source 1..21: mol_type = other RNA
accgtggggaggaaacagcac

SEQ ID NO: 10796 - RNA, 21 nt, synthetic construct
  source 1..21: mol_type = other RNA
acctcaagccatcctcccgcc

SEQ ID NO: 10797 - RNA, 21 nt, synthetic construct
  source 1..21: mol_type = other RNA
acctcagcgccgcgcctttgg

SEQ ID NO: 10798 - RNA, 21 nt, synthetic construct
  source 1..21: mol_type = other RNA
acctcggcgctctgacgctta

SEQ ID NO: 10799 - RNA, 21 nt, synthetic construct
  source 1..21: mol_type = other RNA
acctctgggtctatgtggggc

SEQ ID NO: 10800 - RNA, 21 nt, synthetic construct
  source 1..21: mol_type = other RNA
acctttggcctacggcgacgg

SEQ ID NO: 10801 - RNA, 21 nt, synthetic construct
  source 1..21: mol_type = other RNA
acgaaaagaccacagggccca

SEQ ID NO: 10802 - RNA, 21 nt, synthetic construct
  source 1..21: mol_type = other RNA
acgaagtccacagctctccag

SEQ ID NO: 10803 - RNA, 21 nt, synthetic construct
  source 1..21: mol_type = other RNA
acgaattacagccaaaaggca

SEQ ID NO: 10804 - RNA, 21 nt, synthetic construct
  source 1..21: mol_type = other RNA
acgagcctacccgtcccccac

SEQ ID NO: 10805 - RNA, 21 nt, synthetic construct
  source 1..21: mol_type = other RNA
acgcaaagcacataaagtcct

SEQ ID NO: 10806 - RNA, 21 nt, synthetic construct
  source 1..21: mol_type = other RNA
acgcagaaggcaggcgttttt

SEQ ID NO: 10807 - RNA, 21 nt, synthetic construct
  source 1..21: mol_type = other RNA
acgcccaaccccctcatgttt

SEQ ID NO: 10808 - RNA, 21 nt, synthetic construct
  source 1..21: mol_type = other RNA
acgccctaaactttgtcccga

SEQ ID NO: 10809 - RNA, 21 nt, synthetic construct
  source 1..21: mol_type = other RNA
acgcctcccccagaccccaag

SEQ ID NO: 10810 - RNA, 21 nt, synthetic construct
  source 1..21: mol_type = other RNA
acgcctgccttctgcgtgaga

SEQ ID NO: 10811 - RNA, 21 nt, synthetic construct
  source 1..21: mol_type = other RNA
acgcgacgtttgtagaatgct

SEQ ID NO: 10812 - RNA, 21 nt, synthetic construct
  source 1..21: mol_type = other RNA
acgcgcgctacttgccccttt

SEQ ID NO: 10813 - RNA, 21 nt, synthetic construct
  source 1..21: mol_type = other RNA
acgcgtggaggggcgcttggg

SEQ ID NO: 10814 - RNA, 21 nt, synthetic construct
  source 1..21: mol_type = other RNA
acgcgttcacaaacctcagcg

SEQ ID NO: 10815 - RNA, 21 nt, synthetic construct
  source 1..21: mol_type = other RNA
acgctggagtgcactggcgcc

SEQ ID NO: 10816 - RNA, 21 nt, synthetic construct
  source 1..21: mol_type = other RNA
acgcttatcgacgccctaaac

SEQ ID NO: 10817 - RNA, 21 nt, synthetic construct
  source 1..21: mol_type = other RNA
acggacctcaagccatcctcc

SEQ ID NO: 10818 - RNA, 21 nt, synthetic construct
  source 1..21: mol_type = other RNA
acggagcgagagagcacagcg

SEQ ID NO: 10819 - RNA, 21 nt, synthetic construct
  source 1..21: mol_type = other RNA
acggcgacgggagggtcggga

SEQ ID NO: 10820 - RNA, 21 nt, synthetic construct
  source 1..21: mol_type = other RNA
acggcgggccaccaaggagaa

SEQ ID NO: 10821 - RNA, 21 nt, synthetic construct
  source 1..21: mol_type = other RNA
acgggagggtcgggacaaagt

SEQ ID NO: 10822 - RNA, 21 nt, synthetic construct
  source 1..21: mol_type = other RNA
acgggtaggctcgtcccaaag

SEQ ID NO: 10823 - RNA, 21 nt, synthetic construct
  source 1..21: mol_type = other RNA
acgggtagttcttataatttt

SEQ ID NO: 10824 - RNA, 21 nt, synthetic construct
  source 1..21: mol_type = other RNA
acggtgtggccccacatagac

SEQ ID NO: 10825 - RNA, 21 nt, synthetic construct
  source 1..21: mol_type = other RNA
acgtcgcgtgctgtttcctcc

SEQ ID NO: 10826 - RNA, 21 nt, synthetic construct
  source 1..21: mol_type = other RNA
acgtttgtagaatgcttggct

SEQ ID NO: 10827 - RNA, 21 nt, synthetic construct
  source 1..21: mol_type = other RNA
actaaggcaccgagattttaa

SEQ ID NO: 10828 - RNA, 21 nt, synthetic construct
  source 1..21: mol_type = other RNA
actacccgttattgacatctt

SEQ ID NO: 10829 - RNA, 21 nt, synthetic construct
  source 1..21: mol_type = other RNA
actacggacctcaagccatcc

SEQ ID NO: 10830 - RNA, 21 nt, synthetic construct
  source 1..21: mol_type = other RNA
actactatggttatcttctgc

SEQ ID NO: 10831 - RNA, 21 nt, synthetic construct
  source 1..21: mol_type = other RNA
actagccccacggcgggccac

SEQ ID NO: 10832 - RNA, 21 nt, synthetic construct
  source 1..21: mol_type = other RNA
actatggttatcttctgcctc

SEQ ID NO: 10833 - RNA, 21 nt, synthetic construct
  source 1..21: mol_type = other RNA
actccagctgcgctgggggag

SEQ ID NO: 10834 - RNA, 21 nt, synthetic construct
  source 1..21: mol_type = other RNA
actggagagctgtggacttcg

SEQ ID NO: 10835 - RNA, 21 nt, synthetic construct
  source 1..21: mol_type = other RNA
actggcgccatgatagctcaa

SEQ ID NO: 10836 - RNA, 21 nt, synthetic construct
  source 1..21: mol_type = other RNA
actgggcggcatgggccctgt

SEQ ID NO: 10837 - RNA, 21 nt, synthetic construct
  source 1..21: mol_type = other RNA
actgtgcctcttactttcggt

SEQ ID NO: 10838 - RNA, 21 nt, synthetic construct
  source 1..21: mol_type = other RNA
acttaattacacaggggataa

SEQ ID NO: 10839 - RNA, 21 nt, synthetic construct
  source 1..21: mol_type = other RNA
acttagcgggcgcctagacga

SEQ ID NO: 10840 - RNA, 21 nt, synthetic construct
  source 1..21: mol_type = other RNA
acttagggaggccgaggcggg

SEQ ID NO: 10841 - RNA, 21 nt, synthetic construct
  source 1..21: mol_type = other RNA
acttatttgttcccatcacat

SEQ ID NO: 10842 - RNA, 21 nt, synthetic construct
  source 1..21: mol_type = other RNA
acttcaatctcgattgctgcc

SEQ ID NO: 10843 - RNA, 21 nt, synthetic construct
  source 1..21: mol_type = other RNA
acttcccttctccaagttctc

SEQ ID NO: 10844 - RNA, 21 nt, synthetic construct
  source 1..21: mol_type = other RNA
acttcgtctaggcgcccgcta

SEQ ID NO: 10845 - RNA, 21 nt, synthetic construct
  source 1..21: mol_type = other RNA
acttgcccctttcggcgggga

SEQ ID NO: 10846 - RNA, 21 nt, synthetic construct
  source 1..21: mol_type = other RNA
acttggagaagggaagtcacg

SEQ ID NO: 10847 - RNA, 21 nt, synthetic construct
  source 1..21: mol_type = other RNA
actttatgtgctttgcgtcat

SEQ ID NO: 10848 - RNA, 21 nt, synthetic construct
  source 1..21: mol_type = other RNA
actttcggttttgaaaacatg

SEQ ID NO: 10849 - RNA, 21 nt, synthetic construct
  source 1..21: mol_type = other RNA
actttgtcccgaccctcccgt

SEQ ID NO: 10850 - RNA, 21 nt, synthetic construct
  source 1..21: mol_type = other RNA
agaaaaacgcctgccttctgc

SEQ ID NO: 10851 - RNA, 21 nt, synthetic construct
  source 1..21: mol_type = other RNA
agaaaccctcccccaacctcg

SEQ ID NO: 10852 - RNA, 21 nt, synthetic construct
  source 1..21: mol_type = other RNA
agaaactaaggcaccgagatt

SEQ ID NO: 10853 - RNA, 21 nt, synthetic construct
  source 1..21: mol_type = other RNA
agaaacttaattacacagggg

SEQ ID NO: 10854 - RNA, 21 nt, synthetic construct
  source 1..21: mol_type = other RNA
agaaagatgtcaataacgggt

SEQ ID NO: 10855 - RNA, 21 nt, synthetic construct
  source 1..21: mol_type = other RNA
agaactacccgttattgacat

SEQ ID NO: 10856 - RNA, 21 nt, synthetic construct
  source 1..21: mol_type = other RNA
agaacttggagaagggaagtc

SEQ ID NO: 10857 - RNA, 21 nt, synthetic construct
  source 1..21: mol_type = other RNA
agaagataaccatagtagtta

SEQ ID NO: 10858 - RNA, 21 nt, synthetic construct
  source 1..21: mol_type = other RNA
agaaggcaggcgtttttctta

SEQ ID NO: 10859 - RNA, 21 nt, synthetic construct
  source 1..21: mol_type = other RNA
agaagggaagtcacggagcga

SEQ ID NO: 10860 - RNA, 21 nt, synthetic construct
  source 1..21: mol_type = other RNA
agaatctcacgcagaaggcag

SEQ ID NO: 10861 - RNA, 21 nt, synthetic construct
  source 1..21: mol_type = other RNA
agaatgcttggctgtgataca

SEQ ID NO: 10862 - RNA, 21 nt, synthetic construct
  source 1..21: mol_type = other RNA
agacaggcttacccgggcgac

SEQ ID NO: 10863 - RNA, 21 nt, synthetic construct
  source 1..21: mol_type = other RNA
agaccacagggcccatgccgc

SEQ ID NO: 10864 - RNA, 21 nt, synthetic construct
  source 1..21: mol_type = other RNA
agacccagaggtgctaggaca

SEQ ID NO: 10865 - RNA, 21 nt, synthetic construct
  source 1..21: mol_type = other RNA
agaccccaagcgcccctccac

SEQ ID NO: 10866 - RNA, 21 nt, synthetic construct
  source 1..21: mol_type = other RNA
agacctttggcctacggcgac

SEQ ID NO: 10867 - RNA, 21 nt, synthetic construct
  source 1..21: mol_type = other RNA
agacgaagtccacagctctcc

SEQ ID NO: 10868 - RNA, 21 nt, synthetic construct
  source 1..21: mol_type = other RNA
agactggagagctgtggactt

SEQ ID NO: 10869 - RNA, 21 nt, synthetic construct
  source 1..21: mol_type = other RNA
agagaaaccctcccccaacct

SEQ ID NO: 10870 - RNA, 21 nt, synthetic construct
  source 1..21: mol_type = other RNA
agagagcacagcgagggccac

SEQ ID NO: 10871 - RNA, 21 nt, synthetic construct
  source 1..21: mol_type = other RNA
agagatcctcccgcctcagcc

SEQ ID NO: 10872 - RNA, 21 nt, synthetic construct
  source 1..21: mol_type = other RNA
agagcaaactgggcggcatgg

SEQ ID NO: 10873 - RNA, 21 nt, synthetic construct
  source 1..21: mol_type = other RNA
agagcacagcgagggccacag

SEQ ID NO: 10874 - RNA, 21 nt, synthetic construct
  source 1..21: mol_type = other RNA
agagccaaagaggaagccctc

SEQ ID NO: 10875 - RNA, 21 nt, synthetic construct
  source 1..21: mol_type = other RNA
agagccgcagcagacaggctt

SEQ ID NO: 10876 - RNA, 21 nt, synthetic construct
  source 1..21: mol_type = other RNA
agagcgccgaggttgggggag

SEQ ID NO: 10877 - RNA, 21 nt, synthetic construct
  source 1..21: mol_type = other RNA
agagcggaagagaaaccctcc

SEQ ID NO: 10878 - RNA, 21 nt, synthetic construct
  source 1..21: mol_type = other RNA
agagcgggagaggaaggacca

SEQ ID NO: 10879 - RNA, 21 nt, synthetic construct
  source 1..21: mol_type = other RNA
agagctgtggacttcgtctag

SEQ ID NO: 10880 - RNA, 21 nt, synthetic construct
  source 1..21: mol_type = other RNA
agaggaagccctctgtacgaa

SEQ ID NO: 10881 - RNA, 21 nt, synthetic construct
  source 1..21: mol_type = other RNA
agaggaaggaccagagcggga

SEQ ID NO: 10882 - RNA, 21 nt, synthetic construct
  source 1..21: mol_type = other RNA
agaggcacagtacatcttgga

SEQ ID NO: 10883 - RNA, 21 nt, synthetic construct
  source 1..21: mol_type = other RNA
agaggcagaagataaccatag

SEQ ID NO: 10884 - RNA, 21 nt, synthetic construct
  source 1..21: mol_type = other RNA
agaggccccgcgaaagagcgg

SEQ ID NO: 10885 - RNA, 21 nt, synthetic construct
  source 1..21: mol_type = other RNA
agagggcttcctctttggctc

SEQ ID NO: 10886 - RNA, 21 nt, synthetic construct
  source 1..21: mol_type = other RNA
agagggtgcagagcgggagag

SEQ ID NO: 10887 - RNA, 21 nt, synthetic construct
  source 1..21: mol_type = other RNA
agaggtgctaggacatgcgaa

SEQ ID NO: 10888 - RNA, 21 nt, synthetic construct
  source 1..21: mol_type = other RNA
agataaccatagtagttatct

SEQ ID NO: 10889 - RNA, 21 nt, synthetic construct
  source 1..21: mol_type = other RNA
agataactactatggttatct

SEQ ID NO: 10890 - RNA, 21 nt, synthetic construct
  source 1..21: mol_type = other RNA
agatccagccctggactagcc

SEQ ID NO: 10891 - RNA, 21 nt, synthetic construct
  source 1..21: mol_type = other RNA
agatcctcccgcctcagccac

SEQ ID NO: 10892 - RNA, 21 nt, synthetic construct
  source 1..21: mol_type = other RNA
agatgaagaaactaaggcacc

SEQ ID NO: 10893 - RNA, 21 nt, synthetic construct
  source 1..21: mol_type = other RNA
agatgtactgtgcctcttact

SEQ ID NO: 10894 - RNA, 21 nt, synthetic construct
  source 1..21: mol_type = other RNA
agatgtcaataacgggtagtt

SEQ ID NO: 10895 - RNA, 21 nt, synthetic construct
  source 1..21: mol_type = other RNA
agattctccagagcaaactgg

SEQ ID NO: 10896 - RNA, 21 nt, synthetic construct
  source 1..21: mol_type = other RNA
agattgaagtcaagcctaacc

SEQ ID NO: 10897 - RNA, 21 nt, synthetic construct
  source 1..21: mol_type = other RNA
agcaaactgggcggcatgggc

SEQ ID NO: 10898 - RNA, 21 nt, synthetic construct
  source 1..21: mol_type = other RNA
agcaatcgagattgaagtcaa

SEQ ID NO: 10899 - RNA, 21 nt, synthetic construct
  source 1..21: mol_type = other RNA
agcacagcgagggccacagag

SEQ ID NO: 10900 - RNA, 21 nt, synthetic construct
  source 1..21: mol_type = other RNA
agcacataaagtccttggcac

SEQ ID NO: 10901 - RNA, 21 nt, synthetic construct
  source 1..21: mol_type = other RNA
agcacctctgggtctatgtgg

SEQ ID NO: 10902 - RNA, 21 nt, synthetic construct
  source 1..21: mol_type = other RNA
agcacgcgacgtttgtagaat

SEQ ID NO: 10903 - RNA, 21 nt, synthetic construct
  source 1..21: mol_type = other RNA
agcagacaggcttacccgggc

SEQ ID NO: 10904 - RNA, 21 nt, synthetic construct
  source 1..21: mol_type = other RNA
agcagagccgcagcagacagg

SEQ ID NO: 10905 - RNA, 21 nt, synthetic construct
  source 1..21: mol_type = other RNA
agcagctgggaccacaggcac

SEQ ID NO: 10906 - RNA, 21 nt, synthetic construct
  source 1..21: mol_type = other RNA
agcaggggagacctttggcct

SEQ ID NO: 10907 - RNA, 21 nt, synthetic construct
  source 1..21: mol_type = other RNA
agcattctacaaacgtcgcgt

SEQ ID NO: 10908 - RNA, 21 nt, synthetic construct
  source 1..21: mol_type = other RNA
agccaaaaggcatgcgctccc

SEQ ID NO: 10909 - RNA, 21 nt, synthetic construct
  source 1..21: mol_type = other RNA
agccaaagaggaagccctctg

SEQ ID NO: 10910 - RNA, 21 nt, synthetic construct
  source 1..21: mol_type = other RNA
agccaagcattctacaaacgt

SEQ ID NO: 10911 - RNA, 21 nt, synthetic construct
  source 1..21: mol_type = other RNA
agccaccggagcagctgggac

SEQ ID NO: 10912 - RNA, 21 nt, synthetic construct
  source 1..21: mol_type = other RNA
agccagaggccccgcgaaaga

SEQ ID NO: 10913 - RNA, 21 nt, synthetic construct
  source 1..21: mol_type = other RNA
agccatcctcccgcctcggcc

SEQ ID NO: 10914 - RNA, 21 nt, synthetic construct
  source 1..21: mol_type = other RNA
agccccacggcgggccaccaa

SEQ ID NO: 10915 - RNA, 21 nt, synthetic construct
  source 1..21: mol_type = other RNA
agccctctgtacgaaaagacc

SEQ ID NO: 10916 - RNA, 21 nt, synthetic construct
  source 1..21: mol_type = other RNA
agccctggactagccccacgg

SEQ ID NO: 10917 - RNA, 21 nt, synthetic construct
  source 1..21: mol_type = other RNA
agccctggttaggcttgactt

SEQ ID NO: 10918 - RNA, 21 nt, synthetic construct
  source 1..21: mol_type = other RNA
agccgcagcagacaggcttac

SEQ ID NO: 10919 - RNA, 21 nt, synthetic construct
  source 1..21: mol_type = other RNA
agccgggtgtggtggctcgtg

SEQ ID NO: 10920 - RNA, 21 nt, synthetic construct
  source 1..21: mol_type = other RNA
agcctaaccagggcttttgcg

SEQ ID NO: 10921 - RNA, 21 nt, synthetic construct
  source 1..21: mol_type = other RNA
agcctaagctcaagagatcct

SEQ ID NO: 10922 - RNA, 21 nt, synthetic construct
  source 1..21: mol_type = other RNA
agcctacccgtcccccactcc

SEQ ID NO: 10923 - RNA, 21 nt, synthetic construct
  source 1..21: mol_type = other RNA
agcctggtctctacaaaaaat

SEQ ID NO: 10924 - RNA, 21 nt, synthetic construct
  source 1..21: mol_type = other RNA
agcctgtctgctgcggctctg

SEQ ID NO: 10925 - RNA, 21 nt, synthetic construct
  source 1..21: mol_type = other RNA
agcgagagagcacagcgaggg

SEQ ID NO: 10926 - RNA, 21 nt, synthetic construct
  source 1..21: mol_type = other RNA
agcgagggccacagagggtgc

SEQ ID NO: 10927 - RNA, 21 nt, synthetic construct
  source 1..21: mol_type = other RNA
agcgcagctggagtgggggac

SEQ ID NO: 10928 - RNA, 21 nt, synthetic construct
  source 1..21: mol_type = other RNA
agcgcatgccttttggctgta

SEQ ID NO: 10929 - RNA, 21 nt, synthetic construct
  source 1..21: mol_type = other RNA
agcgcccctccacgcgttcac

SEQ ID NO: 10930 - RNA, 21 nt, synthetic construct
  source 1..21: mol_type = other RNA
agcgccgaggttgggggaggg

SEQ ID NO: 10931 - RNA, 21 nt, synthetic construct
  source 1..21: mol_type = other RNA
agcgccgcgcctttgggacga

SEQ ID NO: 10932 - RNA, 21 nt, synthetic construct
  source 1..21: mol_type = other RNA
agcggaagagaaaccctcccc

SEQ ID NO: 10933 - RNA, 21 nt, synthetic construct
  source 1..21: mol_type = other RNA
agcgggagaggaaggaccaga

SEQ ID NO: 10934 - RNA, 21 nt, synthetic construct
  source 1..21: mol_type = other RNA
agcgggcgcctagacgaagtc

SEQ ID NO: 10935 - RNA, 21 nt, synthetic construct
  source 1..21: mol_type = other RNA
agcggtttcgaataattaact

SEQ ID NO: 10936 - RNA, 21 nt, synthetic construct
  source 1..21: mol_type = other RNA
agcgtcagagcgccgaggttg

SEQ ID NO: 10937 - RNA, 21 nt, synthetic construct
  source 1..21: mol_type = other RNA
agctaccacgcccaaccccct

SEQ ID NO: 10938 - RNA, 21 nt, synthetic construct
  source 1..21: mol_type = other RNA
agctatcatggcgccagtgca

SEQ ID NO: 10939 - RNA, 21 nt, synthetic construct
  source 1..21: mol_type = other RNA
agctcaaaagcctaagctcaa

SEQ ID NO: 10940 - RNA, 21 nt, synthetic construct
  source 1..21: mol_type = other RNA
agctctccagtctaagggaag

SEQ ID NO: 10941 - RNA, 21 nt, synthetic construct
  source 1..21: mol_type = other RNA
agctgcgctgggggagccaga

SEQ ID NO: 10942 - RNA, 21 nt, synthetic construct
  source 1..21: mol_type = other RNA
agctgctccggtggctgaggc

SEQ ID NO: 10943 - RNA, 21 nt, synthetic construct
  source 1..21: mol_type = other RNA
agctggagtgggggacgggta

SEQ ID NO: 10944 - RNA, 21 nt, synthetic construct
  source 1..21: mol_type = other RNA
agctgtggacttcgtctaggc

SEQ ID NO: 10945 - RNA, 21 nt, synthetic construct
  source 1..21: mol_type = other RNA
agcttaggcttttgagctatc

SEQ ID NO: 10946 - RNA, 21 nt, synthetic construct
  source 1..21: mol_type = other RNA
aggaaacagcacgcgacgttt

SEQ ID NO: 10947 - RNA, 21 nt, synthetic construct
  source 1..21: mol_type = other RNA
aggaagccctctgtacgaaaa

SEQ ID NO: 10948 - RNA, 21 nt, synthetic construct
  source 1..21: mol_type = other RNA
aggaaggaccagagcgggagg

SEQ ID NO: 10949 - RNA, 21 nt, synthetic construct
  source 1..21: mol_type = other RNA
aggacatgcgaacttagcggg

SEQ ID NO: 10950 - RNA, 21 nt, synthetic construct
  source 1..21: mol_type = other RNA
aggaccagagcgggagggtag

SEQ ID NO: 10951 - RNA, 21 nt, synthetic construct
  source 1..21: mol_type = other RNA
aggactttatgtgctttgcgt

SEQ ID NO: 10952 - RNA, 21 nt, synthetic construct
  source 1..21: mol_type = other RNA
aggagaacttggagaagggaa

SEQ ID NO: 10953 - RNA, 21 nt, synthetic construct
  source 1..21: mol_type = other RNA
aggatctcttgagcttaggct

SEQ ID NO: 10954 - RNA, 21 nt, synthetic construct
  source 1..21: mol_type = other RNA
aggatggcttgaggtccgtag

SEQ ID NO: 10955 - RNA, 21 nt, synthetic construct
  source 1..21: mol_type = other RNA
aggcaaagagccaaagaggaa

SEQ ID NO: 10956 - RNA, 21 nt, synthetic construct
  source 1..21: mol_type = other RNA
aggcacagtacatcttggaaa

SEQ ID NO: 10957 - RNA, 21 nt, synthetic construct
  source 1..21: mol_type = other RNA
aggcaccgagattttaagaaa

SEQ ID NO: 10958 - RNA, 21 nt, synthetic construct
  source 1..21: mol_type = other RNA
aggcagaagataaccatagta

SEQ ID NO: 10959 - RNA, 21 nt, synthetic construct
  source 1..21: mol_type = other RNA
aggcaggcgtttttcttaaaa

SEQ ID NO: 10960 - RNA, 21 nt, synthetic construct
  source 1..21: mol_type = other RNA
aggcatgcgctcccgcaaaag

SEQ ID NO: 10961 - RNA, 21 nt, synthetic construct
  source 1..21: mol_type = other RNA
aggccaaaggtctcccctgct

SEQ ID NO: 10962 - RNA, 21 nt, synthetic construct
  source 1..21: mol_type = other RNA
aggccccgcgaaagagcggaa

SEQ ID NO: 10963 - RNA, 21 nt, synthetic construct
  source 1..21: mol_type = other RNA
aggccgaggcgggaggatggc

SEQ ID NO: 10964 - RNA, 21 nt, synthetic construct
  source 1..21: mol_type = other RNA
aggcgcccgctaagttcgcat

SEQ ID NO: 10965 - RNA, 21 nt, synthetic construct
  source 1..21: mol_type = other RNA
aggcgcggcgctgaggtttgt

SEQ ID NO: 10966 - RNA, 21 nt, synthetic construct
  source 1..21: mol_type = other RNA
aggcgggaggatctcttgagc

SEQ ID NO: 10967 - RNA, 21 nt, synthetic construct
  source 1..21: mol_type = other RNA
aggcgggaggatggcttgagg

SEQ ID NO: 10968 - RNA, 21 nt, synthetic construct
  source 1..21: mol_type = other RNA
aggcgtaagctaccacgccca

SEQ ID NO: 10969 - RNA, 21 nt, synthetic construct
  source 1..21: mol_type = other RNA
aggcgtcgcccgggtaagcct

SEQ ID NO: 10970 - RNA, 21 nt, synthetic construct
  source 1..21: mol_type = other RNA
aggctcgtcccaaaggcgcgg

SEQ ID NO: 10971 - RNA, 21 nt, synthetic construct
  source 1..21: mol_type = other RNA
aggctggtctcaactacggac

SEQ ID NO: 10972 - RNA, 21 nt, synthetic construct
  source 1..21: mol_type = other RNA
aggcttacccgggcgacgcct

SEQ ID NO: 10973 - RNA, 21 nt, synthetic construct
  source 1..21: mol_type = other RNA
aggcttgacttcaatctcgat

SEQ ID NO: 10974 - RNA, 21 nt, synthetic construct
  source 1..21: mol_type = other RNA
aggcttttgagctatcatggc

SEQ ID NO: 10975 - RNA, 21 nt, synthetic construct
  source 1..21: mol_type = other RNA
agggaagcagagccgcagcag

SEQ ID NO: 10976 - RNA, 21 nt, synthetic construct
  source 1..21: mol_type = other RNA
agggaagtcacggagcgagag

SEQ ID NO: 10977 - RNA, 21 nt, synthetic construct
  source 1..21: mol_type = other RNA
agggaggccgaggcgggagga

SEQ ID NO: 10978 - RNA, 21 nt, synthetic construct
  source 1..21: mol_type = other RNA
agggccacagagggtgcagag

SEQ ID NO: 10979 - RNA, 21 nt, synthetic construct
  source 1..21: mol_type = other RNA
agggcccatgccgcccagttt

SEQ ID NO: 10980 - RNA, 21 nt, synthetic construct
  source 1..21: mol_type = other RNA
agggcgtcgataagcgtcaga

SEQ ID NO: 10981 - RNA, 21 nt, synthetic construct
  source 1..21: mol_type = other RNA
agggctggatctcggggaagc

SEQ ID NO: 10982 - RNA, 21 nt, synthetic construct
  source 1..21: mol_type = other RNA
agggcttcctctttggctctt

SEQ ID NO: 10983 - RNA, 21 nt, synthetic construct
  source 1..21: mol_type = other RNA
agggcttttgcgggagcgcat

SEQ ID NO: 10984 - RNA, 21 nt, synthetic construct
  source 1..21: mol_type = other RNA
aggggagacctttggcctacg

SEQ ID NO: 10985 - RNA, 21 nt, synthetic construct
  source 1..21: mol_type = other RNA
aggggataaatggcagcaatc

SEQ ID NO: 10986 - RNA, 21 nt, synthetic construct
  source 1..21: mol_type = other RNA
aggggcaagtagcgcgcgtcc

SEQ ID NO: 10987 - RNA, 21 nt, synthetic construct
  source 1..21: mol_type = other RNA
aggggcgcttggggtctgggg

SEQ ID NO: 10988 - RNA, 21 nt, synthetic construct
  source 1..21: mol_type = other RNA
agggggttgggcgtggtagct

SEQ ID NO: 10989 - RNA, 21 nt, synthetic construct
  source 1..21: mol_type = other RNA
agggtcgggacaaagtttagg

SEQ ID NO: 10990 - RNA, 21 nt, synthetic construct
  source 1..21: mol_type = other RNA
agggtgcagagcgggagagga

SEQ ID NO: 10991 - RNA, 21 nt, synthetic construct
  source 1..21: mol_type = other RNA
agggtttctcttccgctcttt

SEQ ID NO: 10992 - RNA, 21 nt, synthetic construct
  source 1..21: mol_type = other RNA
aggtccgtagttgagaccagc

SEQ ID NO: 10993 - RNA, 21 nt, synthetic construct
  source 1..21: mol_type = other RNA
aggtctcccctgctccccgcc

SEQ ID NO: 10994 - RNA, 21 nt, synthetic construct
  source 1..21: mol_type = other RNA
aggtgctaggacatgcgaact

SEQ ID NO: 10995 - RNA, 21 nt, synthetic construct
  source 1..21: mol_type = other RNA
aggttgggggagggtttctct

SEQ ID NO: 10996 - RNA, 21 nt, synthetic construct
  source 1..21: mol_type = other RNA
aggtttgtgaacgcgtggagg

SEQ ID NO: 10997 - RNA, 21 nt, synthetic construct
  source 1..21: mol_type = other RNA
agtaagaggcacagtacatct

SEQ ID NO: 10998 - RNA, 21 nt, synthetic construct
  source 1..21: mol_type = other RNA
agtacatcttggaaacaacca

SEQ ID NO: 10999 - RNA, 21 nt, synthetic construct
  source 1..21: mol_type = other RNA
agtagcgcgcgtcccgggtgc

SEQ ID NO: 11000 - RNA, 21 nt, synthetic construct
  source 1..21: mol_type = other RNA
agtagttatctatggcggaag

SEQ ID NO: 11001 - RNA, 21 nt, synthetic construct
  source 1..21: mol_type = other RNA
agtcaagcctaaccagggctt

SEQ ID NO: 11002 - RNA, 21 nt, synthetic construct
  source 1..21: mol_type = other RNA
agtcacggagcgagagagcac

SEQ ID NO: 11003 - RNA, 21 nt, synthetic construct
  source 1..21: mol_type = other RNA
agtccacagctctccagtcta

SEQ ID NO: 11004 - RNA, 21 nt, synthetic construct
  source 1..21: mol_type = other RNA
agtccagggctggatctcggg

SEQ ID NO: 11005 - RNA, 21 nt, synthetic construct
  source 1..21: mol_type = other RNA
agtccttggcacacagaaaga

SEQ ID NO: 11006 - RNA, 21 nt, synthetic construct
  source 1..21: mol_type = other RNA
agtctaagggaagcagagccg

SEQ ID NO: 11007 - RNA, 21 nt, synthetic construct
  source 1..21: mol_type = other RNA
agtctctcctaccctcccgct

SEQ ID NO: 11008 - RNA, 21 nt, synthetic construct
  source 1..21: mol_type = other RNA
agtgacatgtgatgggaacaa

SEQ ID NO: 11009 - RNA, 21 nt, synthetic construct
  source 1..21: mol_type = other RNA
agtgcactccagcgtgggcaa

SEQ ID NO: 11010 - RNA, 21 nt, synthetic construct
  source 1..21: mol_type = other RNA
agtgcactggcgccatgatag

SEQ ID NO: 11011 - RNA, 21 nt, synthetic construct
  source 1..21: mol_type = other RNA
agtggggaagggggtgcgcac

SEQ ID NO: 11012 - RNA, 21 nt, synthetic construct
  source 1..21: mol_type = other RNA
agtgggggacgggtaggctcg

SEQ ID NO: 11013 - RNA, 21 nt, synthetic construct
  source 1..21: mol_type = other RNA
agttaattattcgaaaccgct

SEQ ID NO: 11014 - RNA, 21 nt, synthetic construct
  source 1..21: mol_type = other RNA
agttatctatggcggaagata

SEQ ID NO: 11015 - RNA, 21 nt, synthetic construct
  source 1..21: mol_type = other RNA
agttatcttccgccatagata

SEQ ID NO: 11016 - RNA, 21 nt, synthetic construct
  source 1..21: mol_type = other RNA
agttcgcatgtcctagcacct

SEQ ID NO: 11017 - RNA, 21 nt, synthetic construct
  source 1..21: mol_type = other RNA
agttctccttggtggcccgcc

SEQ ID NO: 11018 - RNA, 21 nt, synthetic construct
  source 1..21: mol_type = other RNA
agtttagggcgtcgataagcg

SEQ ID NO: 11019 - RNA, 21 nt, synthetic construct
  source 1..21: mol_type = other RNA
agtttcttaaaatctcggtgc

SEQ ID NO: 11020 - RNA, 21 nt, synthetic construct
  source 1..21: mol_type = other RNA
agtttcttcatctgtgagagg

SEQ ID NO: 11021 - RNA, 21 nt, synthetic construct
  source 1..21: mol_type = other RNA
agtttgctctggagaatctca

SEQ ID NO: 11022 - RNA, 21 nt, synthetic construct
  source 1..21: mol_type = other RNA
ataaagtccttggcacacaga

SEQ ID NO: 11023 - RNA, 21 nt, synthetic construct
  source 1..21: mol_type = other RNA
ataaatggcagcaatcgagat

SEQ ID NO: 11024 - RNA, 21 nt, synthetic construct
  source 1..21: mol_type = other RNA
ataacgggtagttcttataat

SEQ ID NO: 11025 - RNA, 21 nt, synthetic construct
  source 1..21: mol_type = other RNA
ataactactatggttatcttc

SEQ ID NO: 11026 - RNA, 21 nt, synthetic construct
  source 1..21: mol_type = other RNA
ataagaactacccgttattga

SEQ ID NO: 11027 - RNA, 21 nt, synthetic construct
  source 1..21: mol_type = other RNA
ataagcgtcagagcgccgagg

SEQ ID NO: 11028 - RNA, 21 nt, synthetic construct
  source 1..21: mol_type = other RNA
ataataacaaaaattagccgg

SEQ ID NO: 11029 - RNA, 21 nt, synthetic construct
  source 1..21: mol_type = other RNA
atacaaagcggtttcgaataa

SEQ ID NO: 11030 - RNA, 21 nt, synthetic construct
  source 1..21: mol_type = other RNA
atagacccagaggtgctagga

SEQ ID NO: 11031 - RNA, 21 nt, synthetic construct
  source 1..21: mol_type = other RNA
atagctcaaaagcctaagctc

SEQ ID NO: 11032 - RNA, 21 nt, synthetic construct
  source 1..21: mol_type = other RNA
atagtagttatctatggcgga

SEQ ID NO: 11033 - RNA, 21 nt, synthetic construct
  source 1..21: mol_type = other RNA
atcacagccaagcattctaca

SEQ ID NO: 11034 - RNA, 21 nt, synthetic construct
  source 1..21: mol_type = other RNA
atcatggcgccagtgcactcc

SEQ ID NO: 11035 - RNA, 21 nt, synthetic construct
  source 1..21: mol_type = other RNA
atccagccctggactagcccc

SEQ ID NO: 11036 - RNA, 21 nt, synthetic construct
  source 1..21: mol_type = other RNA
atcccctgtgtaattaagttt

SEQ ID NO: 11037 - RNA, 21 nt, synthetic construct
  source 1..21: mol_type = other RNA
atcctcccgcctcagccaccg

SEQ ID NO: 11038 - RNA, 21 nt, synthetic construct
  source 1..21: mol_type = other RNA
atcgacgccctaaactttgtc

SEQ ID NO: 11039 - RNA, 21 nt, synthetic construct
  source 1..21: mol_type = other RNA
atcgagattgaagtcaagcct

SEQ ID NO: 11040 - RNA, 21 nt, synthetic construct
  source 1..21: mol_type = other RNA
atctatggcggaagataactg

SEQ ID NO: 11041 - RNA, 21 nt, synthetic construct
  source 1..21: mol_type = other RNA
atctcacgcagaaggcaggcg

SEQ ID NO: 11042 - RNA, 21 nt, synthetic construct
  source 1..21: mol_type = other RNA
atctcgattgctgccatttat

SEQ ID NO: 11043 - RNA, 21 nt, synthetic construct
  source 1..21: mol_type = other RNA
atctcggggaagcggcggggt

SEQ ID NO: 11044 - RNA, 21 nt, synthetic construct
  source 1..21: mol_type = other RNA
atctcggtgccttagtttctt

SEQ ID NO: 11045 - RNA, 21 nt, synthetic construct
  source 1..21: mol_type = other RNA
atctcttgagcttaggctttt

SEQ ID NO: 11046 - RNA, 21 nt, synthetic construct
  source 1..21: mol_type = other RNA
atctgtgagaggcagaagata

SEQ ID NO: 11047 - RNA, 21 nt, synthetic construct
  source 1..21: mol_type = other RNA
atcttccgccatagataacta

SEQ ID NO: 11048 - RNA, 21 nt, synthetic construct
  source 1..21: mol_type = other RNA
atcttctgcctctcacagatg

SEQ ID NO: 11049 - RNA, 21 nt, synthetic construct
  source 1..21: mol_type = other RNA
atcttggaaacaaccaggcaa

SEQ ID NO: 11050 - RNA, 21 nt, synthetic construct
  source 1..21: mol_type = other RNA
atctttctgtgtgccaaggac

SEQ ID NO: 11051 - RNA, 21 nt, synthetic construct
  source 1..21: mol_type = other RNA
atgaagaaactaaggcaccga

SEQ ID NO: 11052 - RNA, 21 nt, synthetic construct
  source 1..21: mol_type = other RNA
atgacgcaaagcacataaagt

SEQ ID NO: 11053 - RNA, 21 nt, synthetic construct
  source 1..21: mol_type = other RNA
atgagggggttgggcgtggta

SEQ ID NO: 11054 - RNA, 21 nt, synthetic construct
  source 1..21: mol_type = other RNA
atgatagctcaaaagcctaag

SEQ ID NO: 11055 - RNA, 21 nt, synthetic construct
  source 1..21: mol_type = other RNA
atgcacgaattacagccaaaa

SEQ ID NO: 11056 - RNA, 21 nt, synthetic construct
  source 1..21: mol_type = other RNA
atgccgcccagtttgctctgg

SEQ ID NO: 11057 - RNA, 21 nt, synthetic construct
  source 1..21: mol_type = other RNA
atgccttttggctgtaattcg

SEQ ID NO: 11058 - RNA, 21 nt, synthetic construct
  source 1..21: mol_type = other RNA
atgcgaacttagcgggcgcct

SEQ ID NO: 11059 - RNA, 21 nt, synthetic construct
  source 1..21: mol_type = other RNA
atgcgctcccgcaaaagccct

SEQ ID NO: 11060 - RNA, 21 nt, synthetic construct
  source 1..21: mol_type = other RNA
atgcttggctgtgatacaaag

SEQ ID NO: 11061 - RNA, 21 nt, synthetic construct
  source 1..21: mol_type = other RNA
atggcagcaatcgagattgaa

SEQ ID NO: 11062 - RNA, 21 nt, synthetic construct
  source 1..21: mol_type = other RNA
atggcgccagtgcactccagc

SEQ ID NO: 11063 - RNA, 21 nt, synthetic construct
  source 1..21: mol_type = other RNA
atggcggaagataactgtttt

SEQ ID NO: 11064 - RNA, 21 nt, synthetic construct
  source 1..21: mol_type = other RNA
atggcttgaggtccgtagttg

SEQ ID NO: 11065 - RNA, 21 nt, synthetic construct
  source 1..21: mol_type = other RNA
atgggccctgtggtcttttcg

SEQ ID NO: 11066 - RNA, 21 nt, synthetic construct
  source 1..21: mol_type = other RNA
atggtgaagcctggtctctac

SEQ ID NO: 11067 - RNA, 21 nt, synthetic construct
  source 1..21: mol_type = other RNA
atggttatcttctgcctctca

SEQ ID NO: 11068 - RNA, 21 nt, synthetic construct
  source 1..21: mol_type = other RNA
atgtactgtgcctcttacttt

SEQ ID NO: 11069 - RNA, 21 nt, synthetic construct
  source 1..21: mol_type = other RNA
atgtcaataacgggtagttct

SEQ ID NO: 11070 - RNA, 21 nt, synthetic construct
  source 1..21: mol_type = other RNA
atgtcctagcacctctgggtc

SEQ ID NO: 11071 - RNA, 21 nt, synthetic construct
  source 1..21: mol_type = other RNA
atgtgatgggaacaaataagt

SEQ ID NO: 11072 - RNA, 21 nt, synthetic construct
  source 1..21: mol_type = other RNA
atgtgctttgcgtcatttaat

SEQ ID NO: 11073 - RNA, 21 nt, synthetic construct
  source 1..21: mol_type = other RNA
atgtggggccacaccgtgggg

SEQ ID NO: 11074 - RNA, 21 nt, synthetic construct
  source 1..21: mol_type = other RNA
atgttggccaggctggtctca

SEQ ID NO: 11075 - RNA, 21 nt, synthetic construct
  source 1..21: mol_type = other RNA
atgttttcaaaaccgaaagta

SEQ ID NO: 11076 - RNA, 21 nt, synthetic construct
  source 1..21: mol_type = other RNA
attaaatgacgcaaagcacat

SEQ ID NO: 11077 - RNA, 21 nt, synthetic construct
  source 1..21: mol_type = other RNA
attaacttatttgttcccatc

SEQ ID NO: 11078 - RNA, 21 nt, synthetic construct
  source 1..21: mol_type = other RNA
attacacaggggataaatggc

SEQ ID NO: 11079 - RNA, 21 nt, synthetic construct
  source 1..21: mol_type = other RNA
attacagccaaaaggcatgcg

SEQ ID NO: 11080 - RNA, 21 nt, synthetic construct
  source 1..21: mol_type = other RNA
attacaggcgtaagctaccac

SEQ ID NO: 11081 - RNA, 21 nt, synthetic construct
  source 1..21: mol_type = other RNA
attataagaactacccgttat

SEQ ID NO: 11082 - RNA, 21 nt, synthetic construct
  source 1..21: mol_type = other RNA
attattcgaaaccgctttgta

SEQ ID NO: 11083 - RNA, 21 nt, synthetic construct
  source 1..21: mol_type = other RNA
attattttttgtagagaccag

SEQ ID NO: 11084 - RNA, 21 nt, synthetic construct
  source 1..21: mol_type = other RNA
attcgaaaccgctttgtatca

SEQ ID NO: 11085 - RNA, 21 nt, synthetic construct
  source 1..21: mol_type = other RNA
attctacaaacgtcgcgtgct

SEQ ID NO: 11086 - RNA, 21 nt, synthetic construct
  source 1..21: mol_type = other RNA
attctccagagcaaactgggc

SEQ ID NO: 11087 - RNA, 21 nt, synthetic construct
  source 1..21: mol_type = other RNA
attgaagtcaagcctaaccag

SEQ ID NO: 11088 - RNA, 21 nt, synthetic construct
  source 1..21: mol_type = other RNA
attgacatctttctgtgtgcc

SEQ ID NO: 11089 - RNA, 21 nt, synthetic construct
  source 1..21: mol_type = other RNA
attgctgccatttatcccctg

SEQ ID NO: 11090 - RNA, 21 nt, synthetic construct
  source 1..21: mol_type = other RNA
atttatcccctgtgtaattaa

SEQ ID NO: 11091 - RNA, 21 nt, synthetic construct
  source 1..21: mol_type = other RNA
atttgttcccatcacatgtca

SEQ ID NO: 11092 - RNA, 21 nt, synthetic construct
  source 1..21: mol_type = other RNA
attttttgtagagaccaggct

SEQ ID NO: 11093 - RNA, 21 nt, synthetic construct
  source 1..21: mol_type = other RNA
caaaaccgaaagtaagaggca

SEQ ID NO: 11094 - RNA, 21 nt, synthetic construct
  source 1..21: mol_type = other RNA
caaaagccctggttaggcttg

SEQ ID NO: 11095 - RNA, 21 nt, synthetic construct
  source 1..21: mol_type = other RNA
caaaagcctaagctcaagaga

SEQ ID NO: 11096 - RNA, 21 nt, synthetic construct
  source 1..21: mol_type = other RNA
caaaaggcatgcgctcccgca

SEQ ID NO: 11097 - RNA, 21 nt, synthetic construct
  source 1..21: mol_type = other RNA
caaaattaaatgacgcaaagc

SEQ ID NO: 11098 - RNA, 21 nt, synthetic construct
  source 1..21: mol_type = other RNA
caaacctcagcgccgcgcctt

SEQ ID NO: 11099 - RNA, 21 nt, synthetic construct
  source 1..21: mol_type = other RNA
caaacgtcgcgtgctgtttcc

SEQ ID NO: 11100 - RNA, 21 nt, synthetic construct
  source 1..21: mol_type = other RNA
caaactgggcggcatgggccc

SEQ ID NO: 11101 - RNA, 21 nt, synthetic construct
  source 1..21: mol_type = other RNA
caaagagccaaagaggaagcc

SEQ ID NO: 11102 - RNA, 21 nt, synthetic construct
  source 1..21: mol_type = other RNA
caaagaggaagccctctgtac

SEQ ID NO: 11103 - RNA, 21 nt, synthetic construct
  source 1..21: mol_type = other RNA
caaagcacataaagtccttgg

SEQ ID NO: 11104 - RNA, 21 nt, synthetic construct
  source 1..21: mol_type = other RNA
caaagcggtttcgaataatta

SEQ ID NO: 11105 - RNA, 21 nt, synthetic construct
  source 1..21: mol_type = other RNA
caaaggcgcggcgctgaggtt

SEQ ID NO: 11106 - RNA, 21 nt, synthetic construct
  source 1..21: mol_type = other RNA
caaaggtctcccctgctcccc

SEQ ID NO: 11107 - RNA, 21 nt, synthetic construct
  source 1..21: mol_type = other RNA
caaagtttagggcgtcgataa

SEQ ID NO: 11108 - RNA, 21 nt, synthetic construct
  source 1..21: mol_type = other RNA
caacatggtgaagcctggtct

SEQ ID NO: 11109 - RNA, 21 nt, synthetic construct
  source 1..21: mol_type = other RNA
caaccaggcaaagagccaaag

SEQ ID NO: 11110 - RNA, 21 nt, synthetic construct
  source 1..21: mol_type = other RNA
caaccccctcatgttttcaaa

SEQ ID NO: 11111 - RNA, 21 nt, synthetic construct
  source 1..21: mol_type = other RNA
caacctcggcgctctgacgct

SEQ ID NO: 11112 - RNA, 21 nt, synthetic construct
  source 1..21: mol_type = other RNA
caactacggacctcaagccat

SEQ ID NO: 11113 - RNA, 21 nt, synthetic construct
  source 1..21: mol_type = other RNA
caagagatcctcccgcctcag

SEQ ID NO: 11114 - RNA, 21 nt, synthetic construct
  source 1..21: mol_type = other RNA
caagatgtactgtgcctctta

SEQ ID NO: 11115 - RNA, 21 nt, synthetic construct
  source 1..21: mol_type = other RNA
caagcattctacaaacgtcgc

SEQ ID NO: 11116 - RNA, 21 nt, synthetic construct
  source 1..21: mol_type = other RNA
caagccatcctcccgcctcgg

SEQ ID NO: 11117 - RNA, 21 nt, synthetic construct
  source 1..21: mol_type = other RNA
caagcctaaccagggcttttg

SEQ ID NO: 11118 - RNA, 21 nt, synthetic construct
  source 1..21: mol_type = other RNA
caagcgcccctccacgcgttc

SEQ ID NO: 11119 - RNA, 21 nt, synthetic construct
  source 1..21: mol_type = other RNA
caaggactttatgtgctttgc

SEQ ID NO: 11120 - RNA, 21 nt, synthetic construct
  source 1..21: mol_type = other RNA
caaggagaacttggagaaggg

SEQ ID NO: 11121 - RNA, 21 nt, synthetic construct
  source 1..21: mol_type = other RNA
caagtagcgcgcgtcccgggt

SEQ ID NO: 11122 - RNA, 21 nt, synthetic construct
  source 1..21: mol_type = other RNA
caagttctccttggtggcccg

SEQ ID NO: 11123 - RNA, 21 nt, synthetic construct
  source 1..21: mol_type = other RNA
caataacgggtagttcttata

SEQ ID NO: 11124 - RNA, 21 nt, synthetic construct
  source 1..21: mol_type = other RNA
caatcgagattgaagtcaagc

SEQ ID NO: 11125 - RNA, 21 nt, synthetic construct
  source 1..21: mol_type = other RNA
caatctcgattgctgccattt

SEQ ID NO: 11126 - RNA, 21 nt, synthetic construct
  source 1..21: mol_type = other RNA
cacaaacctcagcgccgcgcc

SEQ ID NO: 11127 - RNA, 21 nt, synthetic construct
  source 1..21: mol_type = other RNA
cacacagaaagatgtcaataa

SEQ ID NO: 11128 - RNA, 21 nt, synthetic construct
  source 1..21: mol_type = other RNA
cacacccggctaatttttgtt

SEQ ID NO: 11129 - RNA, 21 nt, synthetic construct
  source 1..21: mol_type = other RNA
cacaccgtggggaggaaacag

SEQ ID NO: 11130 - RNA, 21 nt, synthetic construct
  source 1..21: mol_type = other RNA
cacagaaagatgtcaataacg

SEQ ID NO: 11131 - RNA, 21 nt, synthetic construct
  source 1..21: mol_type = other RNA
cacagagggtgcagagcggga

SEQ ID NO: 11132 - RNA, 21 nt, synthetic construct
  source 1..21: mol_type = other RNA
cacagatgaagaaactaaggc

SEQ ID NO: 11133 - RNA, 21 nt, synthetic construct
  source 1..21: mol_type = other RNA
cacagccaagcattctacaaa

SEQ ID NO: 11134 - RNA, 21 nt, synthetic construct
  source 1..21: mol_type = other RNA
cacagcgagggccacagaggg

SEQ ID NO: 11135 - RNA, 21 nt, synthetic construct
  source 1..21: mol_type = other RNA
cacagctctccagtctaaggg

SEQ ID NO: 11136 - RNA, 21 nt, synthetic construct
  source 1..21: mol_type = other RNA
cacaggcacgagccaccacac

SEQ ID NO: 11137 - RNA, 21 nt, synthetic construct
  source 1..21: mol_type = other RNA
cacagggcccatgccgcccag

SEQ ID NO: 11138 - RNA, 21 nt, synthetic construct
  source 1..21: mol_type = other RNA
cacaggggataaatggcagca

SEQ ID NO: 11139 - RNA, 21 nt, synthetic construct
  source 1..21: mol_type = other RNA
cacagtacatcttggaaacaa

SEQ ID NO: 11140 - RNA, 21 nt, synthetic construct
  source 1..21: mol_type = other RNA
cacataaagtccttggcacac

SEQ ID NO: 11141 - RNA, 21 nt, synthetic construct
  source 1..21: mol_type = other RNA
cacatagacccagaggtgcta

SEQ ID NO: 11142 - RNA, 21 nt, synthetic construct
  source 1..21: mol_type = other RNA
caccaaggagaacttggagaa

SEQ ID NO: 11143 - RNA, 21 nt, synthetic construct
  source 1..21: mol_type = other RNA
caccacacccggctaattttt

SEQ ID NO: 11144 - RNA, 21 nt, synthetic construct
  source 1..21: mol_type = other RNA
cacccccttccccactcccag

SEQ ID NO: 11145 - RNA, 21 nt, synthetic construct
  source 1..21: mol_type = other RNA
caccccgccgcttccccgaga

SEQ ID NO: 11146 - RNA, 21 nt, synthetic construct
  source 1..21: mol_type = other RNA
cacccggctaatttttgttat

SEQ ID NO: 11147 - RNA, 21 nt, synthetic construct
  source 1..21: mol_type = other RNA
cacccgggacgcgcgctactt

SEQ ID NO: 11148 - RNA, 21 nt, synthetic construct
  source 1..21: mol_type = other RNA
caccctctgtggccctcgctg

SEQ ID NO: 11149 - RNA, 21 nt, synthetic construct
  source 1..21: mol_type = other RNA
caccgagattttaagaaactt

SEQ ID NO: 11150 - RNA, 21 nt, synthetic construct
  source 1..21: mol_type = other RNA
caccggagcagctgggaccac

SEQ ID NO: 11151 - RNA, 21 nt, synthetic construct
  source 1..21: mol_type = other RNA
caccgtggggaggaaacagca

SEQ ID NO: 11152 - RNA, 21 nt, synthetic construct
  source 1..21: mol_type = other RNA
cacctctgggtctatgtgggg

SEQ ID NO: 11153 - RNA, 21 nt, synthetic construct
  source 1..21: mol_type = other RNA
cacgaattacagccaaaaggc

SEQ ID NO: 11154 - RNA, 21 nt, synthetic construct
  source 1..21: mol_type = other RNA
cacgcagaaggcaggcgtttt

SEQ ID NO: 11155 - RNA, 21 nt, synthetic construct
  source 1..21: mol_type = other RNA
cacgcccaaccccctcatgtt

SEQ ID NO: 11156 - RNA, 21 nt, synthetic construct
  source 1..21: mol_type = other RNA
cacgcgacgtttgtagaatgc

SEQ ID NO: 11157 - RNA, 21 nt, synthetic construct
  source 1..21: mol_type = other RNA
cacgcgttcacaaacctcagc

SEQ ID NO: 11158 - RNA, 21 nt, synthetic construct
  source 1..21: mol_type = other RNA
cacgctggagtgcactggcgc

SEQ ID NO: 11159 - RNA, 21 nt, synthetic construct
  source 1..21: mol_type = other RNA
cacggagcgagagagcacagc

SEQ ID NO: 11160 - RNA, 21 nt, synthetic construct
  source 1..21: mol_type = other RNA
cacggcgggccaccaaggaga

SEQ ID NO: 11161 - RNA, 21 nt, synthetic construct
  source 1..21: mol_type = other RNA
cacggtgtggccccacataga

SEQ ID NO: 11162 - RNA, 21 nt, synthetic construct
  source 1..21: mol_type = other RNA
cactccagctgcgctggggga

SEQ ID NO: 11163 - RNA, 21 nt, synthetic construct
  source 1..21: mol_type = other RNA
cactggcgccatgatagctca

SEQ ID NO: 11164 - RNA, 21 nt, synthetic construct
  source 1..21: mol_type = other RNA
cacttagggaggccgaggcgg

SEQ ID NO: 11165 - RNA, 21 nt, synthetic construct
  source 1..21: mol_type = other RNA
cagaaagatgtcaataacggg

SEQ ID NO: 11166 - RNA, 21 nt, synthetic construct
  source 1..21: mol_type = other RNA
cagaagataaccatagtagtt

SEQ ID NO: 11167 - RNA, 21 nt, synthetic construct
  source 1..21: mol_type = other RNA
cagaaggcaggcgtttttctt

SEQ ID NO: 11168 - RNA, 21 nt, synthetic construct
  source 1..21: mol_type = other RNA
cagacaggcttacccgggcga

SEQ ID NO: 11169 - RNA, 21 nt, synthetic construct
  source 1..21: mol_type = other RNA
cagaccccaagcgcccctcca

SEQ ID NO: 11170 - RNA, 21 nt, synthetic construct
  source 1..21: mol_type = other RNA
cagagcaaactgggcggcatg

SEQ ID NO: 11171 - RNA, 21 nt, synthetic construct
  source 1..21: mol_type = other RNA
cagagccgcagcagacaggct

SEQ ID NO: 11172 - RNA, 21 nt, synthetic construct
  source 1..21: mol_type = other RNA
cagagcgccgaggttggggga

SEQ ID NO: 11173 - RNA, 21 nt, synthetic construct
  source 1..21: mol_type = other RNA
cagagcgggagaggaaggacc

SEQ ID NO: 11174 - RNA, 21 nt, synthetic construct
  source 1..21: mol_type = other RNA
cagaggccccgcgaaagagcg

SEQ ID NO: 11175 - RNA, 21 nt, synthetic construct
  source 1..21: mol_type = other RNA
cagagggcttcctctttggct

SEQ ID NO: 11176 - RNA, 21 nt, synthetic construct
  source 1..21: mol_type = other RNA
cagagggtgcagagcgggaga

SEQ ID NO: 11177 - RNA, 21 nt, synthetic construct
  source 1..21: mol_type = other RNA
cagaggtgctaggacatgcga

SEQ ID NO: 11178 - RNA, 21 nt, synthetic construct
  source 1..21: mol_type = other RNA
cagatgaagaaactaaggcac

SEQ ID NO: 11179 - RNA, 21 nt, synthetic construct
  source 1..21: mol_type = other RNA
cagcaatcgagattgaagtca

SEQ ID NO: 11180 - RNA, 21 nt, synthetic construct
  source 1..21: mol_type = other RNA
cagcacgcgacgtttgtagaa

SEQ ID NO: 11181 - RNA, 21 nt, synthetic construct
  source 1..21: mol_type = other RNA
cagcagacaggcttacccggg

SEQ ID NO: 11182 - RNA, 21 nt, synthetic construct
  source 1..21: mol_type = other RNA
cagccaaaaggcatgcgctcc

SEQ ID NO: 11183 - RNA, 21 nt, synthetic construct
  source 1..21: mol_type = other RNA
cagccaagcattctacaaacg

SEQ ID NO: 11184 - RNA, 21 nt, synthetic construct
  source 1..21: mol_type = other RNA
cagccaccggagcagctggga

SEQ ID NO: 11185 - RNA, 21 nt, synthetic construct
  source 1..21: mol_type = other RNA
cagccctggactagccccacg

SEQ ID NO: 11186 - RNA, 21 nt, synthetic construct
  source 1..21: mol_type = other RNA
cagcgagggccacagagggtg

SEQ ID NO: 11187 - RNA, 21 nt, synthetic construct
  source 1..21: mol_type = other RNA
cagcgcagctggagtggggga

SEQ ID NO: 11188 - RNA, 21 nt, synthetic construct
  source 1..21: mol_type = other RNA
cagcgccgcgcctttgggacg

SEQ ID NO: 11189 - RNA, 21 nt, synthetic construct
  source 1..21: mol_type = other RNA
cagctctccagtctaagggaa

SEQ ID NO: 11190 - RNA, 21 nt, synthetic construct
  source 1..21: mol_type = other RNA
cagctgcgctgggggagccag

SEQ ID NO: 11191 - RNA, 21 nt, synthetic construct
  source 1..21: mol_type = other RNA
cagctgctccggtggctgagg

SEQ ID NO: 11192 - RNA, 21 nt, synthetic construct
  source 1..21: mol_type = other RNA
cagctggagtgggggacgggt

SEQ ID NO: 11193 - RNA, 21 nt, synthetic construct
  source 1..21: mol_type = other RNA
cagctgggaccacaggcacga

SEQ ID NO: 11194 - RNA, 21 nt, synthetic construct
  source 1..21: mol_type = other RNA
caggcaaagagccaaagagga

SEQ ID NO: 11195 - RNA, 21 nt, synthetic construct
  source 1..21: mol_type = other RNA
caggcgtaagctaccacgccc

SEQ ID NO: 11196 - RNA, 21 nt, synthetic construct
  source 1..21: mol_type = other RNA
caggctggtctcaactacgga

SEQ ID NO: 11197 - RNA, 21 nt, synthetic construct
  source 1..21: mol_type = other RNA
caggcttacccgggcgacgcc

SEQ ID NO: 11198 - RNA, 21 nt, synthetic construct
  source 1..21: mol_type = other RNA
cagggcccatgccgcccagtt

SEQ ID NO: 11199 - RNA, 21 nt, synthetic construct
  source 1..21: mol_type = other RNA
cagggctggatctcggggaag

SEQ ID NO: 11200 - RNA, 21 nt, synthetic construct
  source 1..21: mol_type = other RNA
cagggcttttgcgggagcgca

SEQ ID NO: 11201 - RNA, 21 nt, synthetic construct
  source 1..21: mol_type = other RNA
caggggagacctttggcctac

SEQ ID NO: 11202 - RNA, 21 nt, synthetic construct
  source 1..21: mol_type = other RNA
caggggataaatggcagcaat

SEQ ID NO: 11203 - RNA, 21 nt, synthetic construct
  source 1..21: mol_type = other RNA
cagtacatcttggaaacaacc

SEQ ID NO: 11204 - RNA, 21 nt, synthetic construct
  source 1..21: mol_type = other RNA
cagtctaagggaagcagagcc

SEQ ID NO: 11205 - RNA, 21 nt, synthetic construct
  source 1..21: mol_type = other RNA
cagtgcactccagcgtgggca

SEQ ID NO: 11206 - RNA, 21 nt, synthetic construct
  source 1..21: mol_type = other RNA
cagttatcttccgccatagat

SEQ ID NO: 11207 - RNA, 21 nt, synthetic construct
  source 1..21: mol_type = other RNA
cagtttgctctggagaatctc

SEQ ID NO: 11208 - RNA, 21 nt, synthetic construct
  source 1..21: mol_type = other RNA
cataaagtccttggcacacag

SEQ ID NO: 11209 - RNA, 21 nt, synthetic construct
  source 1..21: mol_type = other RNA
catagacccagaggtgctagg

SEQ ID NO: 11210 - RNA, 21 nt, synthetic construct
  source 1..21: mol_type = other RNA
catagataactactatggtta

SEQ ID NO: 11211 - RNA, 21 nt, synthetic construct
  source 1..21: mol_type = other RNA
catagtagttatctatggcgg

SEQ ID NO: 11212 - RNA, 21 nt, synthetic construct
  source 1..21: mol_type = other RNA
catcacatgtcacttttaaaa

SEQ ID NO: 11213 - RNA, 21 nt, synthetic construct
  source 1..21: mol_type = other RNA
catcctcccgcctcggcctcc

SEQ ID NO: 11214 - RNA, 21 nt, synthetic construct
  source 1..21: mol_type = other RNA
catctgtgagaggcagaagat

SEQ ID NO: 11215 - RNA, 21 nt, synthetic construct
  source 1..21: mol_type = other RNA
catcttggaaacaaccaggca

SEQ ID NO: 11216 - RNA, 21 nt, synthetic construct
  source 1..21: mol_type = other RNA
catctttctgtgtgccaagga

SEQ ID NO: 11217 - RNA, 21 nt, synthetic construct
  source 1..21: mol_type = other RNA
catgagggggttgggcgtggt

SEQ ID NO: 11218 - RNA, 21 nt, synthetic construct
  source 1..21: mol_type = other RNA
catgatagctcaaaagcctaa

SEQ ID NO: 11219 - RNA, 21 nt, synthetic construct
  source 1..21: mol_type = other RNA
catgccgcccagtttgctctg

SEQ ID NO: 11220 - RNA, 21 nt, synthetic construct
  source 1..21: mol_type = other RNA
catgccttttggctgtaattc

SEQ ID NO: 11221 - RNA, 21 nt, synthetic construct
  source 1..21: mol_type = other RNA
catgcgaacttagcgggcgcc

SEQ ID NO: 11222 - RNA, 21 nt, synthetic construct
  source 1..21: mol_type = other RNA
catgcgctcccgcaaaagccc

SEQ ID NO: 11223 - RNA, 21 nt, synthetic construct
  source 1..21: mol_type = other RNA
catggcgccagtgcactccag

SEQ ID NO: 11224 - RNA, 21 nt, synthetic construct
  source 1..21: mol_type = other RNA
catgggccctgtggtcttttc

SEQ ID NO: 11225 - RNA, 21 nt, synthetic construct
  source 1..21: mol_type = other RNA
catggtgaagcctggtctcta

SEQ ID NO: 11226 - RNA, 21 nt, synthetic construct
  source 1..21: mol_type = other RNA
catgtcctagcacctctgggt

SEQ ID NO: 11227 - RNA, 21 nt, synthetic construct
  source 1..21: mol_type = other RNA
catgtgatgggaacaaataag

SEQ ID NO: 11228 - RNA, 21 nt, synthetic construct
  source 1..21: mol_type = other RNA
catgttggccaggctggtctc

SEQ ID NO: 11229 - RNA, 21 nt, synthetic construct
  source 1..21: mol_type = other RNA
catgttttcaaaaccgaaagt

SEQ ID NO: 11230 - RNA, 21 nt, synthetic construct
  source 1..21: mol_type = other RNA
cattctacaaacgtcgcgtgc

SEQ ID NO: 11231 - RNA, 21 nt, synthetic construct
  source 1..21: mol_type = other RNA
catttatcccctgtgtaatta

SEQ ID NO: 11232 - RNA, 21 nt, synthetic construct
  source 1..21: mol_type = other RNA
ccaaaaggcatgcgctcccgc

SEQ ID NO: 11233 - RNA, 21 nt, synthetic construct
  source 1..21: mol_type = other RNA
ccaaagaggaagccctctgta

SEQ ID NO: 11234 - RNA, 21 nt, synthetic construct
  source 1..21: mol_type = other RNA
ccaaaggcgcggcgctgaggt

SEQ ID NO: 11235 - RNA, 21 nt, synthetic construct
  source 1..21: mol_type = other RNA
ccaaaggtctcccctgctccc

SEQ ID NO: 11236 - RNA, 21 nt, synthetic construct
  source 1..21: mol_type = other RNA
ccaacatggtgaagcctggtc

SEQ ID NO: 11237 - RNA, 21 nt, synthetic construct
  source 1..21: mol_type = other RNA
ccaaccccctcatgttttcaa

SEQ ID NO: 11238 - RNA, 21 nt, synthetic construct
  source 1..21: mol_type = other RNA
ccaacctcggcgctctgacgc

SEQ ID NO: 11239 - RNA, 21 nt, synthetic construct
  source 1..21: mol_type = other RNA
ccaagatgtactgtgcctctt

SEQ ID NO: 11240 - RNA, 21 nt, synthetic construct
  source 1..21: mol_type = other RNA
ccaagcattctacaaacgtcg

SEQ ID NO: 11241 - RNA, 21 nt, synthetic construct
  source 1..21: mol_type = other RNA
ccaagcgcccctccacgcgtt

SEQ ID NO: 11242 - RNA, 21 nt, synthetic construct
  source 1..21: mol_type = other RNA
ccaaggactttatgtgctttg

SEQ ID NO: 11243 - RNA, 21 nt, synthetic construct
  source 1..21: mol_type = other RNA
ccaaggagaacttggagaagg

SEQ ID NO: 11244 - RNA, 21 nt, synthetic construct
  source 1..21: mol_type = other RNA
ccaagttctccttggtggccc

SEQ ID NO: 11245 - RNA, 21 nt, synthetic construct
  source 1..21: mol_type = other RNA
ccacacccggctaatttttgt

SEQ ID NO: 11246 - RNA, 21 nt, synthetic construct
  source 1..21: mol_type = other RNA
ccacaccgtggggaggaaaca

SEQ ID NO: 11247 - RNA, 21 nt, synthetic construct
  source 1..21: mol_type = other RNA
ccacagagggtgcagagcggg

SEQ ID NO: 11248 - RNA, 21 nt, synthetic construct
  source 1..21: mol_type = other RNA
ccacagctctccagtctaagg

SEQ ID NO: 11249 - RNA, 21 nt, synthetic construct
  source 1..21: mol_type = other RNA
ccacaggcacgagccaccaca

SEQ ID NO: 11250 - RNA, 21 nt, synthetic construct
  source 1..21: mol_type = other RNA
ccacagggcccatgccgccca

SEQ ID NO: 11251 - RNA, 21 nt, synthetic construct
  source 1..21: mol_type = other RNA
ccacatagacccagaggtgct

SEQ ID NO: 11252 - RNA, 21 nt, synthetic construct
  source 1..21: mol_type = other RNA
ccaccaaggagaacttggaga

SEQ ID NO: 11253 - RNA, 21 nt, synthetic construct
  source 1..21: mol_type = other RNA
ccaccacacccggctaatttt

SEQ ID NO: 11254 - RNA, 21 nt, synthetic construct
  source 1..21: mol_type = other RNA
ccaccggagcagctgggacca

SEQ ID NO: 11255 - RNA, 21 nt, synthetic construct
  source 1..21: mol_type = other RNA
ccacgcccaaccccctcatgt

SEQ ID NO: 11256 - RNA, 21 nt, synthetic construct
  source 1..21: mol_type = other RNA
ccacgcgttcacaaacctcag

SEQ ID NO: 11257 - RNA, 21 nt, synthetic construct
  source 1..21: mol_type = other RNA
ccacgctggagtgcactggcg

SEQ ID NO: 11258 - RNA, 21 nt, synthetic construct
  source 1..21: mol_type = other RNA
ccacggcgggccaccaaggag

SEQ ID NO: 11259 - RNA, 21 nt, synthetic construct
  source 1..21: mol_type = other RNA
ccacggtgtggccccacatag

SEQ ID NO: 11260 - RNA, 21 nt, synthetic construct
  source 1..21: mol_type = other RNA
ccactccagctgcgctggggg

SEQ ID NO: 11261 - RNA, 21 nt, synthetic construct
  source 1..21: mol_type = other RNA
ccagaccccaagcgcccctcc

SEQ ID NO: 11262 - RNA, 21 nt, synthetic construct
  source 1..21: mol_type = other RNA
ccagagcaaactgggcggcat

SEQ ID NO: 11263 - RNA, 21 nt, synthetic construct
  source 1..21: mol_type = other RNA
ccagaggccccgcgaaagagc

SEQ ID NO: 11264 - RNA, 21 nt, synthetic construct
  source 1..21: mol_type = other RNA
ccagaggtgctaggacatgcg

SEQ ID NO: 11265 - RNA, 21 nt, synthetic construct
  source 1..21: mol_type = other RNA
ccagccctggactagccccac

SEQ ID NO: 11266 - RNA, 21 nt, synthetic construct
  source 1..21: mol_type = other RNA
ccagcgcagctggagtggggg

SEQ ID NO: 11267 - RNA, 21 nt, synthetic construct
  source 1..21: mol_type = other RNA
ccagctgcgctgggggagcca

SEQ ID NO: 11268 - RNA, 21 nt, synthetic construct
  source 1..21: mol_type = other RNA
ccagctgctccggtggctgag

SEQ ID NO: 11269 - RNA, 21 nt, synthetic construct
  source 1..21: mol_type = other RNA
ccaggcaaagagccaaagagg

SEQ ID NO: 11270 - RNA, 21 nt, synthetic construct
  source 1..21: mol_type = other RNA
ccaggctggtctcaactacgg

SEQ ID NO: 11271 - RNA, 21 nt, synthetic construct
  source 1..21: mol_type = other RNA
ccagggctggatctcggggaa

SEQ ID NO: 11272 - RNA, 21 nt, synthetic construct
  source 1..21: mol_type = other RNA
ccagggcttttgcgggagcgc

SEQ ID NO: 11273 - RNA, 21 nt, synthetic construct
  source 1..21: mol_type = other RNA
ccagtctaagggaagcagagc

SEQ ID NO: 11274 - RNA, 21 nt, synthetic construct
  source 1..21: mol_type = other RNA
ccagtgcactccagcgtgggc

SEQ ID NO: 11275 - RNA, 21 nt, synthetic construct
  source 1..21: mol_type = other RNA
ccagtttgctctggagaatct

SEQ ID NO: 11276 - RNA, 21 nt, synthetic construct
  source 1..21: mol_type = other RNA
ccatagataactactatggtt

SEQ ID NO: 11277 - RNA, 21 nt, synthetic construct
  source 1..21: mol_type = other RNA
ccatagtagttatctatggcg

SEQ ID NO: 11278 - RNA, 21 nt, synthetic construct
  source 1..21: mol_type = other RNA
ccatcacatgtcacttttaaa

SEQ ID NO: 11279 - RNA, 21 nt, synthetic construct
  source 1..21: mol_type = other RNA
ccatcctcccgcctcggcctc

SEQ ID NO: 11280 - RNA, 21 nt, synthetic construct
  source 1..21: mol_type = other RNA
ccatgatagctcaaaagccta

SEQ ID NO: 11281 - RNA, 21 nt, synthetic construct
  source 1..21: mol_type = other RNA
ccatgccgcccagtttgctct

SEQ ID NO: 11282 - RNA, 21 nt, synthetic construct
  source 1..21: mol_type = other RNA
ccatgttggccaggctggtct

SEQ ID NO: 11283 - RNA, 21 nt, synthetic construct
  source 1..21: mol_type = other RNA
ccatttatcccctgtgtaatt

SEQ ID NO: 11284 - RNA, 21 nt, synthetic construct
  source 1..21: mol_type = other RNA
cccaaaggcgcggcgctgagg

SEQ ID NO: 11285 - RNA, 21 nt, synthetic construct
  source 1..21: mol_type = other RNA
cccaaccccctcatgttttca

SEQ ID NO: 11286 - RNA, 21 nt, synthetic construct
  source 1..21: mol_type = other RNA
cccaacctcggcgctctgacg

SEQ ID NO: 11287 - RNA, 21 nt, synthetic construct
  source 1..21: mol_type = other RNA
cccaagcgcccctccacgcgt

SEQ ID NO: 11288 - RNA, 21 nt, synthetic construct
  source 1..21: mol_type = other RNA
cccacatagacccagaggtgc

SEQ ID NO: 11289 - RNA, 21 nt, synthetic construct
  source 1..21: mol_type = other RNA
cccacgctggagtgcactggc

SEQ ID NO: 11290 - RNA, 21 nt, synthetic construct
  source 1..21: mol_type = other RNA
cccacggcgggccaccaagga

SEQ ID NO: 11291 - RNA, 21 nt, synthetic construct
  source 1..21: mol_type = other RNA
cccacggtgtggccccacata

SEQ ID NO: 11292 - RNA, 21 nt, synthetic construct
  source 1..21: mol_type = other RNA
cccactccagctgcgctgggg

SEQ ID NO: 11293 - RNA, 21 nt, synthetic construct
  source 1..21: mol_type = other RNA
cccagaccccaagcgcccctc

SEQ ID NO: 11294 - RNA, 21 nt, synthetic construct
  source 1..21: mol_type = other RNA
cccagaggtgctaggacatgc

SEQ ID NO: 11295 - RNA, 21 nt, synthetic construct
  source 1..21: mol_type = other RNA
cccagcgcagctggagtgggg

SEQ ID NO: 11296 - RNA, 21 nt, synthetic construct
  source 1..21: mol_type = other RNA
cccagctgctccggtggctga

SEQ ID NO: 11297 - RNA, 21 nt, synthetic construct
  source 1..21: mol_type = other RNA
cccagtttgctctggagaatc

SEQ ID NO: 11298 - RNA, 21 nt, synthetic construct
  source 1..21: mol_type = other RNA
cccatcacatgtcacttttaa

SEQ ID NO: 11299 - RNA, 21 nt, synthetic construct
  source 1..21: mol_type = other RNA
cccatgccgcccagtttgctc

SEQ ID NO: 11300 - RNA, 21 nt, synthetic construct
  source 1..21: mol_type = other RNA
ccccaacctcggcgctctgac

SEQ ID NO: 11301 - RNA, 21 nt, synthetic construct
  source 1..21: mol_type = other RNA
ccccacatagacccagaggtg

SEQ ID NO: 11302 - RNA, 21 nt, synthetic construct
  source 1..21: mol_type = other RNA
ccccacggtgtggccccacat

SEQ ID NO: 11303 - RNA, 21 nt, synthetic construct
  source 1..21: mol_type = other RNA
ccccactccagctgcgctggg

SEQ ID NO: 11304 - RNA, 21 nt, synthetic construct
  source 1..21: mol_type = other RNA
ccccagaccccaagcgcccct

SEQ ID NO: 11305 - RNA, 21 nt, synthetic construct
  source 1..21: mol_type = other RNA
ccccagcgcagctggagtggg

SEQ ID NO: 11306 - RNA, 21 nt, synthetic construct
  source 1..21: mol_type = other RNA
cccccaacctcggcgctctga

SEQ ID NO: 11307 - RNA, 21 nt, synthetic construct
  source 1..21: mol_type = other RNA
cccccactccagctgcgctgg

SEQ ID NO: 11308 - RNA, 21 nt, synthetic construct
  source 1..21: mol_type = other RNA
cccccagcgcagctggagtgg

SEQ ID NO: 11309 - RNA, 21 nt, synthetic construct
  source 1..21: mol_type = other RNA
ccccctcatgttttcaaaacc

SEQ ID NO: 11310 - RNA, 21 nt, synthetic construct
  source 1..21: mol_type = other RNA
cccccttccccactcccaggc

SEQ ID NO: 11311 - RNA, 21 nt, synthetic construct
  source 1..21: mol_type = other RNA
ccccgagatccagccctggac

SEQ ID NO: 11312 - RNA, 21 nt, synthetic construct
  source 1..21: mol_type = other RNA
ccccgccgaaaggggcaagta

SEQ ID NO: 11313 - RNA, 21 nt, synthetic construct
  source 1..21: mol_type = other RNA
ccccgccgcttccccgagatc

SEQ ID NO: 11314 - RNA, 21 nt, synthetic construct
  source 1..21: mol_type = other RNA
ccccgcgaaagagcggaagag

SEQ ID NO: 11315 - RNA, 21 nt, synthetic construct
  source 1..21: mol_type = other RNA
cccctcatgttttcaaaaccg

SEQ ID NO: 11316 - RNA, 21 nt, synthetic construct
  source 1..21: mol_type = other RNA
cccctccacgcgttcacaaac

SEQ ID NO: 11317 - RNA, 21 nt, synthetic construct
  source 1..21: mol_type = other RNA
cccctgctccccgccgaaagg

SEQ ID NO: 11318 - RNA, 21 nt, synthetic construct
  source 1..21: mol_type = other RNA
cccctgtgtaattaagtttct

SEQ ID NO: 11319 - RNA, 21 nt, synthetic construct
  source 1..21: mol_type = other RNA
ccccttccccactcccaggcc

SEQ ID NO: 11320 - RNA, 21 nt, synthetic construct
  source 1..21: mol_type = other RNA
cccctttcggcggggagcagg

SEQ ID NO: 11321 - RNA, 21 nt, synthetic construct
  source 1..21: mol_type = other RNA
cccgaccctcccgtcgccgta

SEQ ID NO: 11322 - RNA, 21 nt, synthetic construct
  source 1..21: mol_type = other RNA
cccgagatccagccctggact

SEQ ID NO: 11323 - RNA, 21 nt, synthetic construct
  source 1..21: mol_type = other RNA
cccgcaaaagccctggttagg

SEQ ID NO: 11324 - RNA, 21 nt, synthetic construct
  source 1..21: mol_type = other RNA
cccgccgaaaggggcaagtag

SEQ ID NO: 11325 - RNA, 21 nt, synthetic construct
  source 1..21: mol_type = other RNA
cccgccgcttccccgagatcc

SEQ ID NO: 11326 - RNA, 21 nt, synthetic construct
  source 1..21: mol_type = other RNA
cccgccgtggggctagtccag

SEQ ID NO: 11327 - RNA, 21 nt, synthetic construct
  source 1..21: mol_type = other RNA
cccgcctcagccaccggagca

SEQ ID NO: 11328 - RNA, 21 nt, synthetic construct
  source 1..21: mol_type = other RNA
cccgcgaaagagcggaagaga

SEQ ID NO: 11329 - RNA, 21 nt, synthetic construct
  source 1..21: mol_type = other RNA
cccgctaagttcgcatgtcct

SEQ ID NO: 11330 - RNA, 21 nt, synthetic construct
  source 1..21: mol_type = other RNA
cccgctctgcaccctctgtgg

SEQ ID NO: 11331 - RNA, 21 nt, synthetic construct
  source 1..21: mol_type = other RNA
cccgctctggtccttcctctc

SEQ ID NO: 11332 - RNA, 21 nt, synthetic construct
  source 1..21: mol_type = other RNA
cccggctaatttttgttatta

SEQ ID NO: 11333 - RNA, 21 nt, synthetic construct
  source 1..21: mol_type = other RNA
cccgggacgcgcgctacttgc

SEQ ID NO: 11334 - RNA, 21 nt, synthetic construct
  source 1..21: mol_type = other RNA
cccgggtaagcctgtctgctg

SEQ ID NO: 11335 - RNA, 21 nt, synthetic construct
  source 1..21: mol_type = other RNA
cccgtcccccactccagctgc

SEQ ID NO: 11336 - RNA, 21 nt, synthetic construct
  source 1..21: mol_type = other RNA
cccgtcgccgtaggccaaagg

SEQ ID NO: 11337 - RNA, 21 nt, synthetic construct
  source 1..21: mol_type = other RNA
cccgttattgacatctttctg

SEQ ID NO: 11338 - RNA, 21 nt, synthetic construct
  source 1..21: mol_type = other RNA
ccctaaactttgtcccgaccc

SEQ ID NO: 11339 - RNA, 21 nt, synthetic construct
  source 1..21: mol_type = other RNA
ccctcatgttttcaaaaccga

SEQ ID NO: 11340 - RNA, 21 nt, synthetic construct
  source 1..21: mol_type = other RNA
ccctccacgcgttcacaaacc

SEQ ID NO: 11341 - RNA, 21 nt, synthetic construct
  source 1..21: mol_type = other RNA
ccctcccccaacctcggcgct

SEQ ID NO: 11342 - RNA, 21 nt, synthetic construct
  source 1..21: mol_type = other RNA
ccctcccgctctggtccttcc

SEQ ID NO: 11343 - RNA, 21 nt, synthetic construct
  source 1..21: mol_type = other RNA
ccctcccgtcgccgtaggcca

SEQ ID NO: 11344 - RNA, 21 nt, synthetic construct
  source 1..21: mol_type = other RNA
ccctcgctgtgctctctcgct

SEQ ID NO: 11345 - RNA, 21 nt, synthetic construct
  source 1..21: mol_type = other RNA
ccctctgtacgaaaagaccac

SEQ ID NO: 11346 - RNA, 21 nt, synthetic construct
  source 1..21: mol_type = other RNA
ccctctgtggccctcgctgtg

SEQ ID NO: 11347 - RNA, 21 nt, synthetic construct
  source 1..21: mol_type = other RNA
ccctgctccccgccgaaaggg

SEQ ID NO: 11348 - RNA, 21 nt, synthetic construct
  source 1..21: mol_type = other RNA
ccctggactagccccacggcg

SEQ ID NO: 11349 - RNA, 21 nt, synthetic construct
  source 1..21: mol_type = other RNA
ccctggttaggcttgacttca

SEQ ID NO: 11350 - RNA, 21 nt, synthetic construct
  source 1..21: mol_type = other RNA
ccctgtggtcttttcgtacag

SEQ ID NO: 11351 - RNA, 21 nt, synthetic construct
  source 1..21: mol_type = other RNA
ccctgtgtaattaagtttctt

SEQ ID NO: 11352 - RNA, 21 nt, synthetic construct
  source 1..21: mol_type = other RNA
cccttagactggagagctgtg

SEQ ID NO: 11353 - RNA, 21 nt, synthetic construct
  source 1..21: mol_type = other RNA
cccttccccactcccaggcca

SEQ ID NO: 11354 - RNA, 21 nt, synthetic construct
  source 1..21: mol_type = other RNA
cccttctccaagttctccttg

SEQ ID NO: 11355 - RNA, 21 nt, synthetic construct
  source 1..21: mol_type = other RNA
ccctttcggcggggagcaggg

SEQ ID NO: 11356 - RNA, 21 nt, synthetic construct
  source 1..21: mol_type = other RNA
ccgaaaggggcaagtagcgcg

SEQ ID NO: 11357 - RNA, 21 nt, synthetic construct
  source 1..21: mol_type = other RNA
ccgaaagtaagaggcacagta

SEQ ID NO: 11358 - RNA, 21 nt, synthetic construct
  source 1..21: mol_type = other RNA
ccgaccctcccgtcgccgtag

SEQ ID NO: 11359 - RNA, 21 nt, synthetic construct
  source 1..21: mol_type = other RNA
ccgagatccagccctggacta

SEQ ID NO: 11360 - RNA, 21 nt, synthetic construct
  source 1..21: mol_type = other RNA
ccgagattttaagaaacttaa

SEQ ID NO: 11361 - RNA, 21 nt, synthetic construct
  source 1..21: mol_type = other RNA
ccgaggcgggaggatggcttg

SEQ ID NO: 11362 - RNA, 21 nt, synthetic construct
  source 1..21: mol_type = other RNA
ccgaggttgggggagggtttc

SEQ ID NO: 11363 - RNA, 21 nt, synthetic construct
  source 1..21: mol_type = other RNA
ccgcaaaagccctggttaggc

SEQ ID NO: 11364 - RNA, 21 nt, synthetic construct
  source 1..21: mol_type = other RNA
ccgcagcagacaggcttaccc

SEQ ID NO: 11365 - RNA, 21 nt, synthetic construct
  source 1..21: mol_type = other RNA
ccgccatagataactactatg

SEQ ID NO: 11366 - RNA, 21 nt, synthetic construct
  source 1..21: mol_type = other RNA
ccgcccagtttgctctggaga

SEQ ID NO: 11367 - RNA, 21 nt, synthetic construct
  source 1..21: mol_type = other RNA
ccgccgaaaggggcaagtagc

SEQ ID NO: 11368 - RNA, 21 nt, synthetic construct
  source 1..21: mol_type = other RNA
ccgccgcttccccgagatcca

SEQ ID NO: 11369 - RNA, 21 nt, synthetic construct
  source 1..21: mol_type = other RNA
ccgccgtggggctagtccagg

SEQ ID NO: 11370 - RNA, 21 nt, synthetic construct
  source 1..21: mol_type = other RNA
ccgcctcagccaccggagcag

SEQ ID NO: 11371 - RNA, 21 nt, synthetic construct
  source 1..21: mol_type = other RNA
ccgcgaaagagcggaagagaa

SEQ ID NO: 11372 - RNA, 21 nt, synthetic construct
  source 1..21: mol_type = other RNA
ccgcgcctttgggacgagcct

SEQ ID NO: 11373 - RNA, 21 nt, synthetic construct
  source 1..21: mol_type = other RNA
ccgctaagttcgcatgtccta

SEQ ID NO: 11374 - RNA, 21 nt, synthetic construct
  source 1..21: mol_type = other RNA
ccgctctgcaccctctgtggc

SEQ ID NO: 11375 - RNA, 21 nt, synthetic construct
  source 1..21: mol_type = other RNA
ccgctctggtccttcctctcc

SEQ ID NO: 11376 - RNA, 21 nt, synthetic construct
  source 1..21: mol_type = other RNA
ccgctctttcgcggggcctct

SEQ ID NO: 11377 - RNA, 21 nt, synthetic construct
  source 1..21: mol_type = other RNA
ccgcttccccgagatccagcc

SEQ ID NO: 11378 - RNA, 21 nt, synthetic construct
  source 1..21: mol_type = other RNA
ccgctttgtatcacagccaag

SEQ ID NO: 11379 - RNA, 21 nt, synthetic construct
  source 1..21: mol_type = other RNA
ccggagcagctgggaccacag

SEQ ID NO: 11380 - RNA, 21 nt, synthetic construct
  source 1..21: mol_type = other RNA
ccggctaatttttgttattat

SEQ ID NO: 11381 - RNA, 21 nt, synthetic construct
  source 1..21: mol_type = other RNA
ccgggacgcgcgctacttgcc

SEQ ID NO: 11382 - RNA, 21 nt, synthetic construct
  source 1..21: mol_type = other RNA
ccgggtaagcctgtctgctgc

SEQ ID NO: 11383 - RNA, 21 nt, synthetic construct
  source 1..21: mol_type = other RNA
ccgggtgtggtggctcgtgcc

SEQ ID NO: 11384 - RNA, 21 nt, synthetic construct
  source 1..21: mol_type = other RNA
ccggtggctgaggcgggagga

SEQ ID NO: 11385 - RNA, 21 nt, synthetic construct
  source 1..21: mol_type = other RNA
ccgtaggccaaaggtctcccc

SEQ ID NO: 11386 - RNA, 21 nt, synthetic construct
  source 1..21: mol_type = other RNA
ccgtagttgagaccagcctgg

SEQ ID NO: 11387 - RNA, 21 nt, synthetic construct
  source 1..21: mol_type = other RNA
ccgtcccccactccagctgcg

SEQ ID NO: 11388 - RNA, 21 nt, synthetic construct
  source 1..21: mol_type = other RNA
ccgtcgccgtaggccaaaggt

SEQ ID NO: 11389 - RNA, 21 nt, synthetic construct
  source 1..21: mol_type = other RNA
ccgtgacttcccttctccaag

SEQ ID NO: 11390 - RNA, 21 nt, synthetic construct
  source 1..21: mol_type = other RNA
ccgtggggaggaaacagcacg

SEQ ID NO: 11391 - RNA, 21 nt, synthetic construct
  source 1..21: mol_type = other RNA
ccgtggggctagtccagggct

SEQ ID NO: 11392 - RNA, 21 nt, synthetic construct
  source 1..21: mol_type = other RNA
ccgttattgacatctttctgt

SEQ ID NO: 11393 - RNA, 21 nt, synthetic construct
  source 1..21: mol_type = other RNA
cctaaactttgtcccgaccct

SEQ ID NO: 11394 - RNA, 21 nt, synthetic construct
  source 1..21: mol_type = other RNA
cctaaccagggcttttgcggg

SEQ ID NO: 11395 - RNA, 21 nt, synthetic construct
  source 1..21: mol_type = other RNA
cctacccgtcccccactccag

SEQ ID NO: 11396 - RNA, 21 nt, synthetic construct
  source 1..21: mol_type = other RNA
cctaccctcccgctctggtcc

SEQ ID NO: 11397 - RNA, 21 nt, synthetic construct
  source 1..21: mol_type = other RNA
cctacggcgacgggagggtcg

SEQ ID NO: 11398 - RNA, 21 nt, synthetic construct
  source 1..21: mol_type = other RNA
cctagacgaagtccacagctc

SEQ ID NO: 11399 - RNA, 21 nt, synthetic construct
  source 1..21: mol_type = other RNA
cctagcacctctgggtctatg

SEQ ID NO: 11400 - RNA, 21 nt, synthetic construct
  source 1..21: mol_type = other RNA
cctcagccaccggagcagctg

SEQ ID NO: 11401 - RNA, 21 nt, synthetic construct
  source 1..21: mol_type = other RNA
cctcagcgccgcgcctttggg

SEQ ID NO: 11402 - RNA, 21 nt, synthetic construct
  source 1..21: mol_type = other RNA
cctcatgttttcaaaaccgaa

SEQ ID NO: 11403 - RNA, 21 nt, synthetic construct
  source 1..21: mol_type = other RNA
cctccacgcgttcacaaacct

SEQ ID NO: 11404 - RNA, 21 nt, synthetic construct
  source 1..21: mol_type = other RNA
cctccccacggtgtggcccca

SEQ ID NO: 11405 - RNA, 21 nt, synthetic construct
  source 1..21: mol_type = other RNA
cctcccccaacctcggcgctc

SEQ ID NO: 11406 - RNA, 21 nt, synthetic construct
  source 1..21: mol_type = other RNA
cctcccccagaccccaagcgc

SEQ ID NO: 11407 - RNA, 21 nt, synthetic construct
  source 1..21: mol_type = other RNA
cctcccgcctcagccaccgga

SEQ ID NO: 11408 - RNA, 21 nt, synthetic construct
  source 1..21: mol_type = other RNA
cctcccgctctggtccttcct

SEQ ID NO: 11409 - RNA, 21 nt, synthetic construct
  source 1..21: mol_type = other RNA
cctcccgtcgccgtaggccaa

SEQ ID NO: 11410 - RNA, 21 nt, synthetic construct
  source 1..21: mol_type = other RNA
cctcgctgtgctctctcgctc

SEQ ID NO: 11411 - RNA, 21 nt, synthetic construct
  source 1..21: mol_type = other RNA
cctcggcgctctgacgcttat

SEQ ID NO: 11412 - RNA, 21 nt, synthetic construct
  source 1..21: mol_type = other RNA
cctctcacagatgaagaaact

SEQ ID NO: 11413 - RNA, 21 nt, synthetic construct
  source 1..21: mol_type = other RNA
cctctcccgctctgcaccctc

SEQ ID NO: 11414 - RNA, 21 nt, synthetic construct
  source 1..21: mol_type = other RNA
cctctggctcccccagcgcag

SEQ ID NO: 11415 - RNA, 21 nt, synthetic construct
  source 1..21: mol_type = other RNA
cctctgggtctatgtggggcc

SEQ ID NO: 11416 - RNA, 21 nt, synthetic construct
  source 1..21: mol_type = other RNA
cctctgtacgaaaagaccaca

SEQ ID NO: 11417 - RNA, 21 nt, synthetic construct
  source 1..21: mol_type = other RNA
cctctgtggccctcgctgtgc

SEQ ID NO: 11418 - RNA, 21 nt, synthetic construct
  source 1..21: mol_type = other RNA
cctcttactttcggttttgaa

SEQ ID NO: 11419 - RNA, 21 nt, synthetic construct
  source 1..21: mol_type = other RNA
cctctttggctctttgcctgg

SEQ ID NO: 11420 - RNA, 21 nt, synthetic construct
  source 1..21: mol_type = other RNA
cctgccttctgcgtgagattc

SEQ ID NO: 11421 - RNA, 21 nt, synthetic construct
  source 1..21: mol_type = other RNA
cctgctccccgccgaaagggg

SEQ ID NO: 11422 - RNA, 21 nt, synthetic construct
  source 1..21: mol_type = other RNA
cctggactagccccacggcgg

SEQ ID NO: 11423 - RNA, 21 nt, synthetic construct
  source 1..21: mol_type = other RNA
cctgggagtggggaagggggt

SEQ ID NO: 11424 - RNA, 21 nt, synthetic construct
  source 1..21: mol_type = other RNA
cctggtctctacaaaaaataa

SEQ ID NO: 11425 - RNA, 21 nt, synthetic construct
  source 1..21: mol_type = other RNA
cctggttaggcttgacttcaa

SEQ ID NO: 11426 - RNA, 21 nt, synthetic construct
  source 1..21: mol_type = other RNA
cctggttgtttccaagatgta

SEQ ID NO: 11427 - RNA, 21 nt, synthetic construct
  source 1..21: mol_type = other RNA
cctgtctgctgcggctctgct

SEQ ID NO: 11428 - RNA, 21 nt, synthetic construct
  source 1..21: mol_type = other RNA
cctgtggtcccagctgctccg

SEQ ID NO: 11429 - RNA, 21 nt, synthetic construct
  source 1..21: mol_type = other RNA
cctgtggtcttttcgtacaga

SEQ ID NO: 11430 - RNA, 21 nt, synthetic construct
  source 1..21: mol_type = other RNA
cctgtgtaattaagtttctta

SEQ ID NO: 11431 - RNA, 21 nt, synthetic construct
  source 1..21: mol_type = other RNA
ccttagactggagagctgtgg

SEQ ID NO: 11432 - RNA, 21 nt, synthetic construct
  source 1..21: mol_type = other RNA
ccttagtttcttcatctgtga

SEQ ID NO: 11433 - RNA, 21 nt, synthetic construct
  source 1..21: mol_type = other RNA
ccttccccactcccaggccac

SEQ ID NO: 11434 - RNA, 21 nt, synthetic construct
  source 1..21: mol_type = other RNA
ccttcctctcccgctctgcac

SEQ ID NO: 11435 - RNA, 21 nt, synthetic construct
  source 1..21: mol_type = other RNA
ccttctccaagttctccttgg

SEQ ID NO: 11436 - RNA, 21 nt, synthetic construct
  source 1..21: mol_type = other RNA
ccttctgcgtgagattctcca

SEQ ID NO: 11437 - RNA, 21 nt, synthetic construct
  source 1..21: mol_type = other RNA
ccttggcacacagaaagatgt

SEQ ID NO: 11438 - RNA, 21 nt, synthetic construct
  source 1..21: mol_type = other RNA
cctttcggcggggagcagggg

SEQ ID NO: 11439 - RNA, 21 nt, synthetic construct
  source 1..21: mol_type = other RNA
cctttggcctacggcgacggg

SEQ ID NO: 11440 - RNA, 21 nt, synthetic construct
  source 1..21: mol_type = other RNA
cctttgggacgagcctacccg

SEQ ID NO: 11441 - RNA, 21 nt, synthetic construct
  source 1..21: mol_type = other RNA
ccttttggctgtaattcgtgc

SEQ ID NO: 11442 - RNA, 21 nt, synthetic construct
  source 1..21: mol_type = other RNA
cgaaaagaccacagggcccat

SEQ ID NO: 11443 - RNA, 21 nt, synthetic construct
  source 1..21: mol_type = other RNA
cgaaaccgctttgtatcacag

SEQ ID NO: 11444 - RNA, 21 nt, synthetic construct
  source 1..21: mol_type = other RNA
cgaaagagcggaagagaaacc

SEQ ID NO: 11445 - RNA, 21 nt, synthetic construct
  source 1..21: mol_type = other RNA
cgaaaggggcaagtagcgcgc

SEQ ID NO: 11446 - RNA, 21 nt, synthetic construct
  source 1..21: mol_type = other RNA
cgaaagtaagaggcacagtac

SEQ ID NO: 11447 - RNA, 21 nt, synthetic construct
  source 1..21: mol_type = other RNA
cgaacttagcgggcgcctaga

SEQ ID NO: 11448 - RNA, 21 nt, synthetic construct
  source 1..21: mol_type = other RNA
cgaagtccacagctctccagt

SEQ ID NO: 11449 - RNA, 21 nt, synthetic construct
  source 1..21: mol_type = other RNA
cgaattacagccaaaaggcat

SEQ ID NO: 11450 - RNA, 21 nt, synthetic construct
  source 1..21: mol_type = other RNA
cgaccctcccgtcgccgtagg

SEQ ID NO: 11451 - RNA, 21 nt, synthetic construct
  source 1..21: mol_type = other RNA
cgacgccctaaactttgtccc

SEQ ID NO: 11452 - RNA, 21 nt, synthetic construct
  source 1..21: mol_type = other RNA
cgacgcctcccccagacccca

SEQ ID NO: 11453 - RNA, 21 nt, synthetic construct
  source 1..21: mol_type = other RNA
cgacgggagggtcgggacaaa

SEQ ID NO: 11454 - RNA, 21 nt, synthetic construct
  source 1..21: mol_type = other RNA
cgacgtttgtagaatgcttgg

SEQ ID NO: 11455 - RNA, 21 nt, synthetic construct
  source 1..21: mol_type = other RNA
cgagagagcacagcgagggcc

SEQ ID NO: 11456 - RNA, 21 nt, synthetic construct
  source 1..21: mol_type = other RNA
cgagatccagccctggactag

SEQ ID NO: 11457 - RNA, 21 nt, synthetic construct
  source 1..21: mol_type = other RNA
cgagattgaagtcaagcctaa

SEQ ID NO: 11458 - RNA, 21 nt, synthetic construct
  source 1..21: mol_type = other RNA
cgagccaccacacccggctaa

SEQ ID NO: 11459 - RNA, 21 nt, synthetic construct
  source 1..21: mol_type = other RNA
cgagcctacccgtcccccact

SEQ ID NO: 11460 - RNA, 21 nt, synthetic construct
  source 1..21: mol_type = other RNA
cgaggcgggaggatggcttga

SEQ ID NO: 11461 - RNA, 21 nt, synthetic construct
  source 1..21: mol_type = other RNA
cgagggccacagagggtgcag

SEQ ID NO: 11462 - RNA, 21 nt, synthetic construct
  source 1..21: mol_type = other RNA
cgaggttgggggagggtttct

SEQ ID NO: 11463 - RNA, 21 nt, synthetic construct
  source 1..21: mol_type = other RNA
cgataagcgtcagagcgccga

SEQ ID NO: 11464 - RNA, 21 nt, synthetic construct
  source 1..21: mol_type = other RNA
cgattgctgccatttatcccc

SEQ ID NO: 11465 - RNA, 21 nt, synthetic construct
  source 1..21: mol_type = other RNA
cgcaaaagccctggttaggct

SEQ ID NO: 11466 - RNA, 21 nt, synthetic construct
  source 1..21: mol_type = other RNA
cgcaaagcacataaagtcctt

SEQ ID NO: 11467 - RNA, 21 nt, synthetic construct
  source 1..21: mol_type = other RNA
cgcacccccttccccactccc

SEQ ID NO: 11468 - RNA, 21 nt, synthetic construct
  source 1..21: mol_type = other RNA
cgcagaaggcaggcgtttttc

SEQ ID NO: 11469 - RNA, 21 nt, synthetic construct
  source 1..21: mol_type = other RNA
cgcagcagacaggcttacccg

SEQ ID NO: 11470 - RNA, 21 nt, synthetic construct
  source 1..21: mol_type = other RNA
cgcagctggagtgggggacgg

SEQ ID NO: 11471 - RNA, 21 nt, synthetic construct
  source 1..21: mol_type = other RNA
cgcatgccttttggctgtaat

SEQ ID NO: 11472 - RNA, 21 nt, synthetic construct
  source 1..21: mol_type = other RNA
cgcatgtcctagcacctctgg

SEQ ID NO: 11473 - RNA, 21 nt, synthetic construct
  source 1..21: mol_type = other RNA
cgccagtgcactccagcgtgg

SEQ ID NO: 11474 - RNA, 21 nt, synthetic construct
  source 1..21: mol_type = other RNA
cgccatagataactactatgg

SEQ ID NO: 11475 - RNA, 21 nt, synthetic construct
  source 1..21: mol_type = other RNA
cgccatgatagctcaaaagcc

SEQ ID NO: 11476 - RNA, 21 nt, synthetic construct
  source 1..21: mol_type = other RNA
cgcccaaccccctcatgtttt

SEQ ID NO: 11477 - RNA, 21 nt, synthetic construct
  source 1..21: mol_type = other RNA
cgcccagtttgctctggagaa

SEQ ID NO: 11478 - RNA, 21 nt, synthetic construct
  source 1..21: mol_type = other RNA
cgcccctccacgcgttcacaa

SEQ ID NO: 11479 - RNA, 21 nt, synthetic construct
  source 1..21: mol_type = other RNA
cgcccgctaagttcgcatgtc

SEQ ID NO: 11480 - RNA, 21 nt, synthetic construct
  source 1..21: mol_type = other RNA
cgcccgggtaagcctgtctgc

SEQ ID NO: 11481 - RNA, 21 nt, synthetic construct
  source 1..21: mol_type = other RNA
cgccctaaactttgtcccgac

SEQ ID NO: 11482 - RNA, 21 nt, synthetic construct
  source 1..21: mol_type = other RNA
cgccgaaaggggcaagtagcg

SEQ ID NO: 11483 - RNA, 21 nt, synthetic construct
  source 1..21: mol_type = other RNA
cgccgaggttgggggagggtt

SEQ ID NO: 11484 - RNA, 21 nt, synthetic construct
  source 1..21: mol_type = other RNA
cgccgcgcctttgggacgagc

SEQ ID NO: 11485 - RNA, 21 nt, synthetic construct
  source 1..21: mol_type = other RNA
cgccgcttccccgagatccag

SEQ ID NO: 11486 - RNA, 21 nt, synthetic construct
  source 1..21: mol_type = other RNA
cgccgtaggccaaaggtctcc

SEQ ID NO: 11487 - RNA, 21 nt, synthetic construct
  source 1..21: mol_type = other RNA
cgccgtggggctagtccaggg

SEQ ID NO: 11488 - RNA, 21 nt, synthetic construct
  source 1..21: mol_type = other RNA
cgcctagacgaagtccacagc

SEQ ID NO: 11489 - RNA, 21 nt, synthetic construct
  source 1..21: mol_type = other RNA
cgcctcagccaccggagcagc

SEQ ID NO: 11490 - RNA, 21 nt, synthetic construct
  source 1..21: mol_type = other RNA
cgcctcccccagaccccaagc

SEQ ID NO: 11491 - RNA, 21 nt, synthetic construct
  source 1..21: mol_type = other RNA
cgcctgccttctgcgtgagat

SEQ ID NO: 11492 - RNA, 21 nt, synthetic construct
  source 1..21: mol_type = other RNA
cgcctttgggacgagcctacc

SEQ ID NO: 11493 - RNA, 21 nt, synthetic construct
  source 1..21: mol_type = other RNA
cgcgaaagagcggaagagaaa

SEQ ID NO: 11494 - RNA, 21 nt, synthetic construct
  source 1..21: mol_type = other RNA
cgcgacgtttgtagaatgctt

SEQ ID NO: 11495 - RNA, 21 nt, synthetic construct
  source 1..21: mol_type = other RNA
cgcgcctttgggacgagccta

SEQ ID NO: 11496 - RNA, 21 nt, synthetic construct
  source 1..21: mol_type = other RNA
cgcgcgctacttgcccctttc

SEQ ID NO: 11497 - RNA, 21 nt, synthetic construct
  source 1..21: mol_type = other RNA
cgcgctacttgcccctttcgg

SEQ ID NO: 11498 - RNA, 21 nt, synthetic construct
  source 1..21: mol_type = other RNA
cgcggcgctgaggtttgtgaa

SEQ ID NO: 11499 - RNA, 21 nt, synthetic construct
  source 1..21: mol_type = other RNA
cgcgtgctgtttcctccccac

SEQ ID NO: 11500 - RNA, 21 nt, synthetic construct
  source 1..21: mol_type = other RNA
cgcgttcacaaacctcagcgc

SEQ ID NO: 11501 - RNA, 21 nt, synthetic construct
  source 1..21: mol_type = other RNA
cgctaagttcgcatgtcctag

SEQ ID NO: 11502 - RNA, 21 nt, synthetic construct
  source 1..21: mol_type = other RNA
cgctacttgcccctttcggcg

SEQ ID NO: 11503 - RNA, 21 nt, synthetic construct
  source 1..21: mol_type = other RNA
cgctcccgcaaaagccctggt

SEQ ID NO: 11504 - RNA, 21 nt, synthetic construct
  source 1..21: mol_type = other RNA
cgctccgtgacttcccttctc

SEQ ID NO: 11505 - RNA, 21 nt, synthetic construct
  source 1..21: mol_type = other RNA
cgctctgacgcttatcgacgc

SEQ ID NO: 11506 - RNA, 21 nt, synthetic construct
  source 1..21: mol_type = other RNA
cgctctgcaccctctgtggcc

SEQ ID NO: 11507 - RNA, 21 nt, synthetic construct
  source 1..21: mol_type = other RNA
cgctctggtccttcctctccc

SEQ ID NO: 11508 - RNA, 21 nt, synthetic construct
  source 1..21: mol_type = other RNA
cgctctgttgcccacgctgga

SEQ ID NO: 11509 - RNA, 21 nt, synthetic construct
  source 1..21: mol_type = other RNA
cgctctttcgcggggcctctg

SEQ ID NO: 11510 - RNA, 21 nt, synthetic construct
  source 1..21: mol_type = other RNA
cgctgaggtttgtgaacgcgt

SEQ ID NO: 11511 - RNA, 21 nt, synthetic construct
  source 1..21: mol_type = other RNA
cgctggagtgcactggcgcca

SEQ ID NO: 11512 - RNA, 21 nt, synthetic construct
  source 1..21: mol_type = other RNA
cgctgtgctctctcgctccgt

SEQ ID NO: 11513 - RNA, 21 nt, synthetic construct
  source 1..21: mol_type = other RNA
cgcttatcgacgccctaaact

SEQ ID NO: 11514 - RNA, 21 nt, synthetic construct
  source 1..21: mol_type = other RNA
cgcttccccgagatccagccc

SEQ ID NO: 11515 - RNA, 21 nt, synthetic construct
  source 1..21: mol_type = other RNA
cgcttggggtctgggggaggc

SEQ ID NO: 11516 - RNA, 21 nt, synthetic construct
  source 1..21: mol_type = other RNA
cgctttgtatcacagccaagc

SEQ ID NO: 11517 - RNA, 21 nt, synthetic construct
  source 1..21: mol_type = other RNA
cggaagagaaaccctccccca

SEQ ID NO: 11518 - RNA, 21 nt, synthetic construct
  source 1..21: mol_type = other RNA
cggaagataactgttttcaaa

SEQ ID NO: 11519 - RNA, 21 nt, synthetic construct
  source 1..21: mol_type = other RNA
cggacctcaagccatcctccc

SEQ ID NO: 11520 - RNA, 21 nt, synthetic construct
  source 1..21: mol_type = other RNA
cggagcagctgggaccacagg

SEQ ID NO: 11521 - RNA, 21 nt, synthetic construct
  source 1..21: mol_type = other RNA
cggagcgagagagcacagcga

SEQ ID NO: 11522 - RNA, 21 nt, synthetic construct
  source 1..21: mol_type = other RNA
cggcatgggccctgtggtctt

SEQ ID NO: 11523 - RNA, 21 nt, synthetic construct
  source 1..21: mol_type = other RNA
cggcgctctgacgcttatcga

SEQ ID NO: 11524 - RNA, 21 nt, synthetic construct
  source 1..21: mol_type = other RNA
cggcgctgaggtttgtgaacg

SEQ ID NO: 11525 - RNA, 21 nt, synthetic construct
  source 1..21: mol_type = other RNA
cggcgggccaccaaggagaac

SEQ ID NO: 11526 - RNA, 21 nt, synthetic construct
  source 1..21: mol_type = other RNA
cggctctgcttcccttagact

SEQ ID NO: 11527 - RNA, 21 nt, synthetic construct
  source 1..21: mol_type = other RNA
cgggacaaagtttagggcgtc

SEQ ID NO: 11528 - RNA, 21 nt, synthetic construct
  source 1..21: mol_type = other RNA
cgggacgcgcgctacttgccc

SEQ ID NO: 11529 - RNA, 21 nt, synthetic construct
  source 1..21: mol_type = other RNA
cgggagaggaaggaccagagc

SEQ ID NO: 11530 - RNA, 21 nt, synthetic construct
  source 1..21: mol_type = other RNA
cgggagcgcatgccttttggc

SEQ ID NO: 11531 - RNA, 21 nt, synthetic construct
  source 1..21: mol_type = other RNA
cgggaggatctcttgagctta

SEQ ID NO: 11532 - RNA, 21 nt, synthetic construct
  source 1..21: mol_type = other RNA
cgggaggatggcttgaggtcc

SEQ ID NO: 11533 - RNA, 21 nt, synthetic construct
  source 1..21: mol_type = other RNA
cgggagggtcgggacaaagtt

SEQ ID NO: 11534 - RNA, 21 nt, synthetic construct
  source 1..21: mol_type = other RNA
cgggccaccaaggagaacttg

SEQ ID NO: 11535 - RNA, 21 nt, synthetic construct
  source 1..21: mol_type = other RNA
cgggcgcctagacgaagtcca

SEQ ID NO: 11536 - RNA, 21 nt, synthetic construct
  source 1..21: mol_type = other RNA
cggggagcaggggagaccttt

SEQ ID NO: 11537 - RNA, 21 nt, synthetic construct
  source 1..21: mol_type = other RNA
cgggtaagcctgtctgctgcg

SEQ ID NO: 11538 - RNA, 21 nt, synthetic construct
  source 1..21: mol_type = other RNA
cgggtaggctcgtcccaaagg

SEQ ID NO: 11539 - RNA, 21 nt, synthetic construct
  source 1..21: mol_type = other RNA
cgggtagttcttataattttt

SEQ ID NO: 11540 - RNA, 21 nt, synthetic construct
  source 1..21: mol_type = other RNA
cgggtgtggtggctcgtgcct

SEQ ID NO: 11541 - RNA, 21 nt, synthetic construct
  source 1..21: mol_type = other RNA
cggtgccttagtttcttcatc

SEQ ID NO: 11542 - RNA, 21 nt, synthetic construct
  source 1..21: mol_type = other RNA
cggtggctgaggcgggaggat

SEQ ID NO: 11543 - RNA, 21 nt, synthetic construct
  source 1..21: mol_type = other RNA
cggtgtggccccacatagacc

SEQ ID NO: 11544 - RNA, 21 nt, synthetic construct
  source 1..21: mol_type = other RNA
cggtttcgaataattaactta

SEQ ID NO: 11545 - RNA, 21 nt, synthetic construct
  source 1..21: mol_type = other RNA
cggttttgaaaacatgagggg

SEQ ID NO: 11546 - RNA, 21 nt, synthetic construct
  source 1..21: mol_type = other RNA
cgtaagctaccacgcccaacc

SEQ ID NO: 11547 - RNA, 21 nt, synthetic construct
  source 1..21: mol_type = other RNA
cgtacagagggcttcctcttt

SEQ ID NO: 11548 - RNA, 21 nt, synthetic construct
  source 1..21: mol_type = other RNA
cgtaggccaaaggtctcccct

SEQ ID NO: 11549 - RNA, 21 nt, synthetic construct
  source 1..21: mol_type = other RNA
cgtagttgagaccagcctggc

SEQ ID NO: 11550 - RNA, 21 nt, synthetic construct
  source 1..21: mol_type = other RNA
cgtcagagcgccgaggttggg

SEQ ID NO: 11551 - RNA, 21 nt, synthetic construct
  source 1..21: mol_type = other RNA
cgtcccaaaggcgcggcgctg

SEQ ID NO: 11552 - RNA, 21 nt, synthetic construct
  source 1..21: mol_type = other RNA
cgtcccccactccagctgcgc

SEQ ID NO: 11553 - RNA, 21 nt, synthetic construct
  source 1..21: mol_type = other RNA
cgtcgataagcgtcagagcgc

SEQ ID NO: 11554 - RNA, 21 nt, synthetic construct
  source 1..21: mol_type = other RNA
cgtcgcccgggtaagcctgtc

SEQ ID NO: 11555 - RNA, 21 nt, synthetic construct
  source 1..21: mol_type = other RNA
cgtcgccgtaggccaaaggtc

SEQ ID NO: 11556 - RNA, 21 nt, synthetic construct
  source 1..21: mol_type = other RNA
cgtcgcgtgctgtttcctccc

SEQ ID NO: 11557 - RNA, 21 nt, synthetic construct
  source 1..21: mol_type = other RNA
cgtctaggcgcccgctaagtt

SEQ ID NO: 11558 - RNA, 21 nt, synthetic construct
  source 1..21: mol_type = other RNA
cgtgacttcccttctccaagt

SEQ ID NO: 11559 - RNA, 21 nt, synthetic construct
  source 1..21: mol_type = other RNA
cgtgagattctccagagcaaa

SEQ ID NO: 11560 - RNA, 21 nt, synthetic construct
  source 1..21: mol_type = other RNA
cgtgcctgtggtcccagctgc

SEQ ID NO: 11561 - RNA, 21 nt, synthetic construct
  source 1..21: mol_type = other RNA
cgtgctgtttcctccccacgg

SEQ ID NO: 11562 - RNA, 21 nt, synthetic construct
  source 1..21: mol_type = other RNA
cgtggaggggcgcttggggtc

SEQ ID NO: 11563 - RNA, 21 nt, synthetic construct
  source 1..21: mol_type = other RNA
cgtggggaggaaacagcacgc

SEQ ID NO: 11564 - RNA, 21 nt, synthetic construct
  source 1..21: mol_type = other RNA
cgtggggctagtccagggctg

SEQ ID NO: 11565 - RNA, 21 nt, synthetic construct
  source 1..21: mol_type = other RNA
cgttattgacatctttctgtg

SEQ ID NO: 11566 - RNA, 21 nt, synthetic construct
  source 1..21: mol_type = other RNA
cgttcacaaacctcagcgccg

SEQ ID NO: 11567 - RNA, 21 nt, synthetic construct
  source 1..21: mol_type = other RNA
cgtttgtagaatgcttggctg

SEQ ID NO: 11568 - RNA, 21 nt, synthetic construct
  source 1..21: mol_type = other RNA
ctaaactttgtcccgaccctc

SEQ ID NO: 11569 - RNA, 21 nt, synthetic construct
  source 1..21: mol_type = other RNA
ctaaccagggcttttgcggga

SEQ ID NO: 11570 - RNA, 21 nt, synthetic construct
  source 1..21: mol_type = other RNA
ctaagctcaagagatcctccc

SEQ ID NO: 11571 - RNA, 21 nt, synthetic construct
  source 1..21: mol_type = other RNA
ctaaggcaccgagattttaag

SEQ ID NO: 11572 - RNA, 21 nt, synthetic construct
  source 1..21: mol_type = other RNA
ctaagggaagcagagccgcag

SEQ ID NO: 11573 - RNA, 21 nt, synthetic construct
  source 1..21: mol_type = other RNA
ctaagttcgcatgtcctagca

SEQ ID NO: 11574 - RNA, 21 nt, synthetic construct
  source 1..21: mol_type = other RNA
ctacaaacgtcgcgtgctgtt

SEQ ID NO: 11575 - RNA, 21 nt, synthetic construct
  source 1..21: mol_type = other RNA
ctaccacgcccaaccccctca

SEQ ID NO: 11576 - RNA, 21 nt, synthetic construct
  source 1..21: mol_type = other RNA
ctacccgtcccccactccagc

SEQ ID NO: 11577 - RNA, 21 nt, synthetic construct
  source 1..21: mol_type = other RNA
ctacccgttattgacatcttt

SEQ ID NO: 11578 - RNA, 21 nt, synthetic construct
  source 1..21: mol_type = other RNA
ctaccctcccgctctggtcct

SEQ ID NO: 11579 - RNA, 21 nt, synthetic construct
  source 1..21: mol_type = other RNA
ctacggacctcaagccatcct

SEQ ID NO: 11580 - RNA, 21 nt, synthetic construct
  source 1..21: mol_type = other RNA
ctacggcgacgggagggtcgg

SEQ ID NO: 11581 - RNA, 21 nt, synthetic construct
  source 1..21: mol_type = other RNA
ctactatggttatcttctgcc

SEQ ID NO: 11582 - RNA, 21 nt, synthetic construct
  source 1..21: mol_type = other RNA
ctacttgcccctttcggcggg

SEQ ID NO: 11583 - RNA, 21 nt, synthetic construct
  source 1..21: mol_type = other RNA
ctagacgaagtccacagctct

SEQ ID NO: 11584 - RNA, 21 nt, synthetic construct
  source 1..21: mol_type = other RNA
ctagcacctctgggtctatgt

SEQ ID NO: 11585 - RNA, 21 nt, synthetic construct
  source 1..21: mol_type = other RNA
ctaggacatgcgaacttagcg

SEQ ID NO: 11586 - RNA, 21 nt, synthetic construct
  source 1..21: mol_type = other RNA
ctaggcgcccgctaagttcgc

SEQ ID NO: 11587 - RNA, 21 nt, synthetic construct
  source 1..21: mol_type = other RNA
ctagtccagggctggatctcg

SEQ ID NO: 11588 - RNA, 21 nt, synthetic construct
  source 1..21: mol_type = other RNA
ctatcatggcgccagtgcact

SEQ ID NO: 11589 - RNA, 21 nt, synthetic construct
  source 1..21: mol_type = other RNA
ctatggcggaagataactgtt

SEQ ID NO: 11590 - RNA, 21 nt, synthetic construct
  source 1..21: mol_type = other RNA
ctatggttatcttctgcctct

SEQ ID NO: 11591 - RNA, 21 nt, synthetic construct
  source 1..21: mol_type = other RNA
ctatgtggggccacaccgtgg

SEQ ID NO: 11592 - RNA, 21 nt, synthetic construct
  source 1..21: mol_type = other RNA
ctcaaaagcctaagctcaaga

SEQ ID NO: 11593 - RNA, 21 nt, synthetic construct
  source 1..21: mol_type = other RNA
ctcaactacggacctcaagcc

SEQ ID NO: 11594 - RNA, 21 nt, synthetic construct
  source 1..21: mol_type = other RNA
ctcaagagatcctcccgcctc

SEQ ID NO: 11595 - RNA, 21 nt, synthetic construct
  source 1..21: mol_type = other RNA
ctcacagatgaagaaactaag

SEQ ID NO: 11596 - RNA, 21 nt, synthetic construct
  source 1..21: mol_type = other RNA
ctcacgcagaaggcaggcgtt

SEQ ID NO: 11597 - RNA, 21 nt, synthetic construct
  source 1..21: mol_type = other RNA
ctcagccaccggagcagctgg

SEQ ID NO: 11598 - RNA, 21 nt, synthetic construct
  source 1..21: mol_type = other RNA
ctcagcgccgcgcctttggga

SEQ ID NO: 11599 - RNA, 21 nt, synthetic construct
  source 1..21: mol_type = other RNA
ctcatgttttcaaaaccgaaa

SEQ ID NO: 11600 - RNA, 21 nt, synthetic construct
  source 1..21: mol_type = other RNA
ctccaagttctccttggtggc

SEQ ID NO: 11601 - RNA, 21 nt, synthetic construct
  source 1..21: mol_type = other RNA
ctccacgcgttcacaaacctc

SEQ ID NO: 11602 - RNA, 21 nt, synthetic construct
  source 1..21: mol_type = other RNA
ctccagagcaaactgggcggc

SEQ ID NO: 11603 - RNA, 21 nt, synthetic construct
  source 1..21: mol_type = other RNA
ctccagctgcgctgggggagc

SEQ ID NO: 11604 - RNA, 21 nt, synthetic construct
  source 1..21: mol_type = other RNA
ctccagtctaagggaagcaga

SEQ ID NO: 11605 - RNA, 21 nt, synthetic construct
  source 1..21: mol_type = other RNA
ctccccacggtgtggccccac

SEQ ID NO: 11606 - RNA, 21 nt, synthetic construct
  source 1..21: mol_type = other RNA
ctcccccaacctcggcgctct

SEQ ID NO: 11607 - RNA, 21 nt, synthetic construct
  source 1..21: mol_type = other RNA
ctcccccagaccccaagcgcc

SEQ ID NO: 11608 - RNA, 21 nt, synthetic construct
  source 1..21: mol_type = other RNA
ctcccccagcgcagctggagt

SEQ ID NO: 11609 - RNA, 21 nt, synthetic construct
  source 1..21: mol_type = other RNA
ctccccgccgaaaggggcaag

SEQ ID NO: 11610 - RNA, 21 nt, synthetic construct
  source 1..21: mol_type = other RNA
ctcccctgctccccgccgaaa

SEQ ID NO: 11611 - RNA, 21 nt, synthetic construct
  source 1..21: mol_type = other RNA
ctcccgcaaaagccctggtta

SEQ ID NO: 11612 - RNA, 21 nt, synthetic construct
  source 1..21: mol_type = other RNA
ctcccgcctcagccaccggag

SEQ ID NO: 11613 - RNA, 21 nt, synthetic construct
  source 1..21: mol_type = other RNA
ctcccgctctgcaccctctgt

SEQ ID NO: 11614 - RNA, 21 nt, synthetic construct
  source 1..21: mol_type = other RNA
ctcccgctctggtccttcctc

SEQ ID NO: 11615 - RNA, 21 nt, synthetic construct
  source 1..21: mol_type = other RNA
ctcccgtcgccgtaggccaaa

SEQ ID NO: 11616 - RNA, 21 nt, synthetic construct
  source 1..21: mol_type = other RNA
ctccggtggctgaggcgggag

SEQ ID NO: 11617 - RNA, 21 nt, synthetic construct
  source 1..21: mol_type = other RNA
ctccgtgacttcccttctcca

SEQ ID NO: 11618 - RNA, 21 nt, synthetic construct
  source 1..21: mol_type = other RNA
ctcctaccctcccgctctggt

SEQ ID NO: 11619 - RNA, 21 nt, synthetic construct
  source 1..21: mol_type = other RNA
ctccttggtggcccgccgtgg

SEQ ID NO: 11620 - RNA, 21 nt, synthetic construct
  source 1..21: mol_type = other RNA
ctcgattgctgccatttatcc

SEQ ID NO: 11621 - RNA, 21 nt, synthetic construct
  source 1..21: mol_type = other RNA
ctcgctccgtgacttcccttc

SEQ ID NO: 11622 - RNA, 21 nt, synthetic construct
  source 1..21: mol_type = other RNA
ctcgctctgttgcccacgctg

SEQ ID NO: 11623 - RNA, 21 nt, synthetic construct
  source 1..21: mol_type = other RNA
ctcgctgtgctctctcgctcc

SEQ ID NO: 11624 - RNA, 21 nt, synthetic construct
  source 1..21: mol_type = other RNA
ctcggcgctctgacgcttatc

SEQ ID NO: 11625 - RNA, 21 nt, synthetic construct
  source 1..21: mol_type = other RNA
ctcggtgccttagtttcttca

SEQ ID NO: 11626 - RNA, 21 nt, synthetic construct
  source 1..21: mol_type = other RNA
ctcgtcccaaaggcgcggcgc

SEQ ID NO: 11627 - RNA, 21 nt, synthetic construct
  source 1..21: mol_type = other RNA
ctcgtgcctgtggtcccagct

SEQ ID NO: 11628 - RNA, 21 nt, synthetic construct
  source 1..21: mol_type = other RNA
ctctcacagatgaagaaacta

SEQ ID NO: 11629 - RNA, 21 nt, synthetic construct
  source 1..21: mol_type = other RNA
ctctccagtctaagggaagca

SEQ ID NO: 11630 - RNA, 21 nt, synthetic construct
  source 1..21: mol_type = other RNA
ctctcccgctctgcaccctct

SEQ ID NO: 11631 - RNA, 21 nt, synthetic construct
  source 1..21: mol_type = other RNA
ctctcctaccctcccgctctg

SEQ ID NO: 11632 - RNA, 21 nt, synthetic construct
  source 1..21: mol_type = other RNA
ctctcgctccgtgacttccct

SEQ ID NO: 11633 - RNA, 21 nt, synthetic construct
  source 1..21: mol_type = other RNA
ctctctcgctccgtgacttcc

SEQ ID NO: 11634 - RNA, 21 nt, synthetic construct
  source 1..21: mol_type = other RNA
ctctgacgcttatcgacgccc

SEQ ID NO: 11635 - RNA, 21 nt, synthetic construct
  source 1..21: mol_type = other RNA
ctctgcaccctctgtggccct

SEQ ID NO: 11636 - RNA, 21 nt, synthetic construct
  source 1..21: mol_type = other RNA
ctctgcttcccttagactgga

SEQ ID NO: 11637 - RNA, 21 nt, synthetic construct
  source 1..21: mol_type = other RNA
ctctggagaatctcacgcaga

SEQ ID NO: 11638 - RNA, 21 nt, synthetic construct
  source 1..21: mol_type = other RNA
ctctggctcccccagcgcagc

SEQ ID NO: 11639 - RNA, 21 nt, synthetic construct
  source 1..21: mol_type = other RNA
ctctgggtctatgtggggcca

SEQ ID NO: 11640 - RNA, 21 nt, synthetic construct
  source 1..21: mol_type = other RNA
ctctggtccttcctctcccgc

SEQ ID NO: 11641 - RNA, 21 nt, synthetic construct
  source 1..21: mol_type = other RNA
ctctgtacgaaaagaccacag

SEQ ID NO: 11642 - RNA, 21 nt, synthetic construct
  source 1..21: mol_type = other RNA
ctctgtggccctcgctgtgct

SEQ ID NO: 11643 - RNA, 21 nt, synthetic construct
  source 1..21: mol_type = other RNA
ctcttactttcggttttgaaa

SEQ ID NO: 11644 - RNA, 21 nt, synthetic construct
  source 1..21: mol_type = other RNA
ctcttccgctctttcgcgggg

SEQ ID NO: 11645 - RNA, 21 nt, synthetic construct
  source 1..21: mol_type = other RNA
ctcttgagcttaggcttttga

SEQ ID NO: 11646 - RNA, 21 nt, synthetic construct
  source 1..21: mol_type = other RNA
ctctttcgcggggcctctggc

SEQ ID NO: 11647 - RNA, 21 nt, synthetic construct
  source 1..21: mol_type = other RNA
ctctttgcctggttgtttcca

SEQ ID NO: 11648 - RNA, 21 nt, synthetic construct
  source 1..21: mol_type = other RNA
ctctttggctctttgcctggt

SEQ ID NO: 11649 - RNA, 21 nt, synthetic construct
  source 1..21: mol_type = other RNA
ctgacgcttatcgacgcccta

SEQ ID NO: 11650 - RNA, 21 nt, synthetic construct
  source 1..21: mol_type = other RNA
ctgaggtttgtgaacgcgtgg

SEQ ID NO: 11651 - RNA, 21 nt, synthetic construct
  source 1..21: mol_type = other RNA
ctgcaccctctgtggccctcg

SEQ ID NO: 11652 - RNA, 21 nt, synthetic construct
  source 1..21: mol_type = other RNA
ctgccatttatcccctgtgta

SEQ ID NO: 11653 - RNA, 21 nt, synthetic construct
  source 1..21: mol_type = other RNA
ctgcctctcacagatgaagaa

SEQ ID NO: 11654 - RNA, 21 nt, synthetic construct
  source 1..21: mol_type = other RNA
ctgccttctgcgtgagattct

SEQ ID NO: 11655 - RNA, 21 nt, synthetic construct
  source 1..21: mol_type = other RNA
ctgcgctgggggagccagagg

SEQ ID NO: 11656 - RNA, 21 nt, synthetic construct
  source 1..21: mol_type = other RNA
ctgcggctctgcttcccttag

SEQ ID NO: 11657 - RNA, 21 nt, synthetic construct
  source 1..21: mol_type = other RNA
ctgcgtgagattctccagagc

SEQ ID NO: 11658 - RNA, 21 nt, synthetic construct
  source 1..21: mol_type = other RNA
ctgctccccgccgaaaggggc

SEQ ID NO: 11659 - RNA, 21 nt, synthetic construct
  source 1..21: mol_type = other RNA
ctgctccggtggctgaggcgg

SEQ ID NO: 11660 - RNA, 21 nt, synthetic construct
  source 1..21: mol_type = other RNA
ctgctgcggctctgcttccct

SEQ ID NO: 11661 - RNA, 21 nt, synthetic construct
  source 1..21: mol_type = other RNA
ctgcttcccttagactggaga

SEQ ID NO: 11662 - RNA, 21 nt, synthetic construct
  source 1..21: mol_type = other RNA
ctggactagccccacggcggg

SEQ ID NO: 11663 - RNA, 21 nt, synthetic construct
  source 1..21: mol_type = other RNA
ctggagaatctcacgcagaag

SEQ ID NO: 11664 - RNA, 21 nt, synthetic construct
  source 1..21: mol_type = other RNA
ctggagagctgtggacttcgt

SEQ ID NO: 11665 - RNA, 21 nt, synthetic construct
  source 1..21: mol_type = other RNA
ctggagtgcactggcgccatg

SEQ ID NO: 11666 - RNA, 21 nt, synthetic construct
  source 1..21: mol_type = other RNA
ctggagtgggggacgggtagg

SEQ ID NO: 11667 - RNA, 21 nt, synthetic construct
  source 1..21: mol_type = other RNA
ctggatctcggggaagcggcg

SEQ ID NO: 11668 - RNA, 21 nt, synthetic construct
  source 1..21: mol_type = other RNA
ctggcgccatgatagctcaaa

SEQ ID NO: 11669 - RNA, 21 nt, synthetic construct
  source 1..21: mol_type = other RNA
ctggctcccccagcgcagctg

SEQ ID NO: 11670 - RNA, 21 nt, synthetic construct
  source 1..21: mol_type = other RNA
ctgggagtggggaagggggtg

SEQ ID NO: 11671 - RNA, 21 nt, synthetic construct
  source 1..21: mol_type = other RNA
ctgggcggcatgggccctgtg

SEQ ID NO: 11672 - RNA, 21 nt, synthetic construct
  source 1..21: mol_type = other RNA
ctgggtctatgtggggccaca

SEQ ID NO: 11673 - RNA, 21 nt, synthetic construct
  source 1..21: mol_type = other RNA
ctggtccttcctctcccgctc

SEQ ID NO: 11674 - RNA, 21 nt, synthetic construct
  source 1..21: mol_type = other RNA
ctggtctcaactacggacctc

SEQ ID NO: 11675 - RNA, 21 nt, synthetic construct
  source 1..21: mol_type = other RNA
ctggtctctacaaaaaataat

SEQ ID NO: 11676 - RNA, 21 nt, synthetic construct
  source 1..21: mol_type = other RNA
ctggttaggcttgacttcaat

SEQ ID NO: 11677 - RNA, 21 nt, synthetic construct
  source 1..21: mol_type = other RNA
ctggttgtttccaagatgtac

SEQ ID NO: 11678 - RNA, 21 nt, synthetic construct
  source 1..21: mol_type = other RNA
ctgtacgaaaagaccacaggg

SEQ ID NO: 11679 - RNA, 21 nt, synthetic construct
  source 1..21: mol_type = other RNA
ctgtctgctgcggctctgctt

SEQ ID NO: 11680 - RNA, 21 nt, synthetic construct
  source 1..21: mol_type = other RNA
ctgtgagaggcagaagataac

SEQ ID NO: 11681 - RNA, 21 nt, synthetic construct
  source 1..21: mol_type = other RNA
ctgtgatacaaagcggtttcg

SEQ ID NO: 11682 - RNA, 21 nt, synthetic construct
  source 1..21: mol_type = other RNA
ctgtgcctcttactttcggtt

SEQ ID NO: 11683 - RNA, 21 nt, synthetic construct
  source 1..21: mol_type = other RNA
ctgtgctctctcgctccgtga

SEQ ID NO: 11684 - RNA, 21 nt, synthetic construct
  source 1..21: mol_type = other RNA
ctgtggacttcgtctaggcgc

SEQ ID NO: 11685 - RNA, 21 nt, synthetic construct
  source 1..21: mol_type = other RNA
ctgtggccctcgctgtgctct

SEQ ID NO: 11686 - RNA, 21 nt, synthetic construct
  source 1..21: mol_type = other RNA
ctgtggtcccagctgctccgg

SEQ ID NO: 11687 - RNA, 21 nt, synthetic construct
  source 1..21: mol_type = other RNA
ctgtggtcttttcgtacagag

SEQ ID NO: 11688 - RNA, 21 nt, synthetic construct
  source 1..21: mol_type = other RNA
ctgtgtgccaaggactttatg

SEQ ID NO: 11689 - RNA, 21 nt, synthetic construct
  source 1..21: mol_type = other RNA
ctgttgcccacgctggagtgc

SEQ ID NO: 11690 - RNA, 21 nt, synthetic construct
  source 1..21: mol_type = other RNA
ctgtttcctccccacggtgtg

SEQ ID NO: 11691 - RNA, 21 nt, synthetic construct
  source 1..21: mol_type = other RNA
cttaaaatctcggtgccttag

SEQ ID NO: 11692 - RNA, 21 nt, synthetic construct
  source 1..21: mol_type = other RNA
cttaattacacaggggataaa

SEQ ID NO: 11693 - RNA, 21 nt, synthetic construct
  source 1..21: mol_type = other RNA
cttacccgggcgacgcctccc

SEQ ID NO: 11694 - RNA, 21 nt, synthetic construct
  source 1..21: mol_type = other RNA
cttactttcggttttgaaaac

SEQ ID NO: 11695 - RNA, 21 nt, synthetic construct
  source 1..21: mol_type = other RNA
cttagactggagagctgtgga

SEQ ID NO: 11696 - RNA, 21 nt, synthetic construct
  source 1..21: mol_type = other RNA
cttagcgggcgcctagacgaa

SEQ ID NO: 11697 - RNA, 21 nt, synthetic construct
  source 1..21: mol_type = other RNA
cttaggcttttgagctatcat

SEQ ID NO: 11698 - RNA, 21 nt, synthetic construct
  source 1..21: mol_type = other RNA
cttagggaggccgaggcggga

SEQ ID NO: 11699 - RNA, 21 nt, synthetic construct
  source 1..21: mol_type = other RNA
cttagtttcttcatctgtgag

SEQ ID NO: 11700 - RNA, 21 nt, synthetic construct
  source 1..21: mol_type = other RNA
cttatcgacgccctaaacttt

SEQ ID NO: 11701 - RNA, 21 nt, synthetic construct
  source 1..21: mol_type = other RNA
cttatttgttcccatcacatg

SEQ ID NO: 11702 - RNA, 21 nt, synthetic construct
  source 1..21: mol_type = other RNA
cttcaatctcgattgctgcca

SEQ ID NO: 11703 - RNA, 21 nt, synthetic construct
  source 1..21: mol_type = other RNA
cttcatctgtgagaggcagaa

SEQ ID NO: 11704 - RNA, 21 nt, synthetic construct
  source 1..21: mol_type = other RNA
cttccccactcccaggccacc

SEQ ID NO: 11705 - RNA, 21 nt, synthetic construct
  source 1..21: mol_type = other RNA
cttccccgagatccagccctg

SEQ ID NO: 11706 - RNA, 21 nt, synthetic construct
  source 1..21: mol_type = other RNA
cttcccttagactggagagct

SEQ ID NO: 11707 - RNA, 21 nt, synthetic construct
  source 1..21: mol_type = other RNA
cttcccttctccaagttctcc

SEQ ID NO: 11708 - RNA, 21 nt, synthetic construct
  source 1..21: mol_type = other RNA
cttccgccatagataactact

SEQ ID NO: 11709 - RNA, 21 nt, synthetic construct
  source 1..21: mol_type = other RNA
cttccgctctttcgcggggcc

SEQ ID NO: 11710 - RNA, 21 nt, synthetic construct
  source 1..21: mol_type = other RNA
cttcctctcccgctctgcacc

SEQ ID NO: 11711 - RNA, 21 nt, synthetic construct
  source 1..21: mol_type = other RNA
cttcctctttggctctttgcc

SEQ ID NO: 11712 - RNA, 21 nt, synthetic construct
  source 1..21: mol_type = other RNA
cttcgtctaggcgcccgctaa

SEQ ID NO: 11713 - RNA, 21 nt, synthetic construct
  source 1..21: mol_type = other RNA
cttctccaagttctccttggt

SEQ ID NO: 11714 - RNA, 21 nt, synthetic construct
  source 1..21: mol_type = other RNA
cttctgcctctcacagatgaa

SEQ ID NO: 11715 - RNA, 21 nt, synthetic construct
  source 1..21: mol_type = other RNA
cttctgcgtgagattctccag

SEQ ID NO: 11716 - RNA, 21 nt, synthetic construct
  source 1..21: mol_type = other RNA
cttgacttcaatctcgattgc

SEQ ID NO: 11717 - RNA, 21 nt, synthetic construct
  source 1..21: mol_type = other RNA
cttgagcttaggcttttgagc

SEQ ID NO: 11718 - RNA, 21 nt, synthetic construct
  source 1..21: mol_type = other RNA
cttgaggtccgtagttgagac

SEQ ID NO: 11719 - RNA, 21 nt, synthetic construct
  source 1..21: mol_type = other RNA
cttgcccctttcggcggggag

SEQ ID NO: 11720 - RNA, 21 nt, synthetic construct
  source 1..21: mol_type = other RNA
cttggaaacaaccaggcaaag

SEQ ID NO: 11721 - RNA, 21 nt, synthetic construct
  source 1..21: mol_type = other RNA
cttggagaagggaagtcacgg

SEQ ID NO: 11722 - RNA, 21 nt, synthetic construct
  source 1..21: mol_type = other RNA
cttggcacacagaaagatgtc

SEQ ID NO: 11723 - RNA, 21 nt, synthetic construct
  source 1..21: mol_type = other RNA
cttggctgtgatacaaagcgg

SEQ ID NO: 11724 - RNA, 21 nt, synthetic construct
  source 1..21: mol_type = other RNA
cttggggtctgggggaggcgt

SEQ ID NO: 11725 - RNA, 21 nt, synthetic construct
  source 1..21: mol_type = other RNA
ctttatgtgctttgcgtcatt

SEQ ID NO: 11726 - RNA, 21 nt, synthetic construct
  source 1..21: mol_type = other RNA
ctttcgcggggcctctggctc

SEQ ID NO: 11727 - RNA, 21 nt, synthetic construct
  source 1..21: mol_type = other RNA
ctttcggcggggagcagggga

SEQ ID NO: 11728 - RNA, 21 nt, synthetic construct
  source 1..21: mol_type = other RNA
ctttcggttttgaaaacatga

SEQ ID NO: 11729 - RNA, 21 nt, synthetic construct
  source 1..21: mol_type = other RNA
ctttctgtgtgccaaggactt

SEQ ID NO: 11730 - RNA, 21 nt, synthetic construct
  source 1..21: mol_type = other RNA
ctttgcctggttgtttccaag

SEQ ID NO: 11731 - RNA, 21 nt, synthetic construct
  source 1..21: mol_type = other RNA
ctttgcgtcatttaattttga

SEQ ID NO: 11732 - RNA, 21 nt, synthetic construct
  source 1..21: mol_type = other RNA
ctttggcctacggcgacggga

SEQ ID NO: 11733 - RNA, 21 nt, synthetic construct
  source 1..21: mol_type = other RNA
ctttggctctttgcctggttg

SEQ ID NO: 11734 - RNA, 21 nt, synthetic construct
  source 1..21: mol_type = other RNA
ctttgggacgagcctacccgt

SEQ ID NO: 11735 - RNA, 21 nt, synthetic construct
  source 1..21: mol_type = other RNA
ctttgtatcacagccaagcat

SEQ ID NO: 11736 - RNA, 21 nt, synthetic construct
  source 1..21: mol_type = other RNA
ctttgtcccgaccctcccgtc

SEQ ID NO: 11737 - RNA, 21 nt, synthetic construct
  source 1..21: mol_type = other RNA
cttttcgtacagagggcttcc

SEQ ID NO: 11738 - RNA, 21 nt, synthetic construct
  source 1..21: mol_type = other RNA
cttttgagctatcatggcgcc

SEQ ID NO: 11739 - RNA, 21 nt, synthetic construct
  source 1..21: mol_type = other RNA
cttttgcgggagcgcatgcct

SEQ ID NO: 11740 - RNA, 21 nt, synthetic construct
  source 1..21: mol_type = other RNA
cttttggctgtaattcgtgca

SEQ ID NO: 11741 - RNA, 21 nt, synthetic construct
  source 1..21: mol_type = other RNA
gaaaaacgcctgccttctgcg

SEQ ID NO: 11742 - RNA, 21 nt, synthetic construct
  source 1..21: mol_type = other RNA
gaaaacagttatcttccgcca

SEQ ID NO: 11743 - RNA, 21 nt, synthetic construct
  source 1..21: mol_type = other RNA
gaaaacatgagggggttgggc

SEQ ID NO: 11744 - RNA, 21 nt, synthetic construct
  source 1..21: mol_type = other RNA
gaaaagaccacagggcccatg

SEQ ID NO: 11745 - RNA, 21 nt, synthetic construct
  source 1..21: mol_type = other RNA
gaaacaaccaggcaaagagcc

SEQ ID NO: 11746 - RNA, 21 nt, synthetic construct
  source 1..21: mol_type = other RNA
gaaacagcacgcgacgtttgt

SEQ ID NO: 11747 - RNA, 21 nt, synthetic construct
  source 1..21: mol_type = other RNA
gaaaccctcccccaacctcgg

SEQ ID NO: 11748 - RNA, 21 nt, synthetic construct
  source 1..21: mol_type = other RNA
gaaaccgctttgtatcacagc

SEQ ID NO: 11749 - RNA, 21 nt, synthetic construct
  source 1..21: mol_type = other RNA
gaaactaaggcaccgagattt

SEQ ID NO: 11750 - RNA, 21 nt, synthetic construct
  source 1..21: mol_type = other RNA
gaaacttaattacacagggga

SEQ ID NO: 11751 - RNA, 21 nt, synthetic construct
  source 1..21: mol_type = other RNA
gaaagagcggaagagaaaccc

SEQ ID NO: 11752 - RNA, 21 nt, synthetic construct
  source 1..21: mol_type = other RNA
gaaagatgtcaataacgggta

SEQ ID NO: 11753 - RNA, 21 nt, synthetic construct
  source 1..21: mol_type = other RNA
gaaaggggcaagtagcgcgcg

SEQ ID NO: 11754 - RNA, 21 nt, synthetic construct
  source 1..21: mol_type = other RNA
gaaagtaagaggcacagtaca

SEQ ID NO: 11755 - RNA, 21 nt, synthetic construct
  source 1..21: mol_type = other RNA
gaacgcgtggaggggcgcttg

SEQ ID NO: 11756 - RNA, 21 nt, synthetic construct
  source 1..21: mol_type = other RNA
gaactacccgttattgacatc

SEQ ID NO: 11757 - RNA, 21 nt, synthetic construct
  source 1..21: mol_type = other RNA
gaacttagcgggcgcctagac

SEQ ID NO: 11758 - RNA, 21 nt, synthetic construct
  source 1..21: mol_type = other RNA
gaacttggagaagggaagtca

SEQ ID NO: 11759 - RNA, 21 nt, synthetic construct
  source 1..21: mol_type = other RNA
gaagaaactaaggcaccgaga

SEQ ID NO: 11760 - RNA, 21 nt, synthetic construct
  source 1..21: mol_type = other RNA
gaagagaaaccctcccccaac

SEQ ID NO: 11761 - RNA, 21 nt, synthetic construct
  source 1..21: mol_type = other RNA
gaagataaccatagtagttat

SEQ ID NO: 11762 - RNA, 21 nt, synthetic construct
  source 1..21: mol_type = other RNA
gaagcagagccgcagcagaca

SEQ ID NO: 11763 - RNA, 21 nt, synthetic construct
  source 1..21: mol_type = other RNA
gaagccctctgtacgaaaaga

SEQ ID NO: 11764 - RNA, 21 nt, synthetic construct
  source 1..21: mol_type = other RNA
gaagcctggtctctacaaaaa

SEQ ID NO: 11765 - RNA, 21 nt, synthetic construct
  source 1..21: mol_type = other RNA
gaaggaccagagcgggagggt

SEQ ID NO: 11766 - RNA, 21 nt, synthetic construct
  source 1..21: mol_type = other RNA
gaaggcaggcgtttttcttaa

SEQ ID NO: 11767 - RNA, 21 nt, synthetic construct
  source 1..21: mol_type = other RNA
gaagggaagtcacggagcgag

SEQ ID NO: 11768 - RNA, 21 nt, synthetic construct
  source 1..21: mol_type = other RNA
gaagggggtgcgcacccggga

SEQ ID NO: 11769 - RNA, 21 nt, synthetic construct
  source 1..21: mol_type = other RNA
gaagtcaagcctaaccagggc

SEQ ID NO: 11770 - RNA, 21 nt, synthetic construct
  source 1..21: mol_type = other RNA
gaagtcacggagcgagagagc

SEQ ID NO: 11771 - RNA, 21 nt, synthetic construct
  source 1..21: mol_type = other RNA
gaagtccacagctctccagtc

SEQ ID NO: 11772 - RNA, 21 nt, synthetic construct
  source 1..21: mol_type = other RNA
gaatctcacgcagaaggcagg

SEQ ID NO: 11773 - RNA, 21 nt, synthetic construct
  source 1..21: mol_type = other RNA
gaatgcttggctgtgatacaa

SEQ ID NO: 11774 - RNA, 21 nt, synthetic construct
  source 1..21: mol_type = other RNA
gaattacagccaaaaggcatg

SEQ ID NO: 11775 - RNA, 21 nt, synthetic construct
  source 1..21: mol_type = other RNA
gacaaagtttagggcgtcgat

SEQ ID NO: 11776 - RNA, 21 nt, synthetic construct
  source 1..21: mol_type = other RNA
gacaggcttacccgggcgacg

SEQ ID NO: 11777 - RNA, 21 nt, synthetic construct
  source 1..21: mol_type = other RNA
gacatctttctgtgtgccaag

SEQ ID NO: 11778 - RNA, 21 nt, synthetic construct
  source 1..21: mol_type = other RNA
gacatgcgaacttagcgggcg

SEQ ID NO: 11779 - RNA, 21 nt, synthetic construct
  source 1..21: mol_type = other RNA
gacatgtgatgggaacaaata

SEQ ID NO: 11780 - RNA, 21 nt, synthetic construct
  source 1..21: mol_type = other RNA
gaccacaggcacgagccacca

SEQ ID NO: 11781 - RNA, 21 nt, synthetic construct
  source 1..21: mol_type = other RNA
gaccacagggcccatgccgcc

SEQ ID NO: 11782 - RNA, 21 nt, synthetic construct
  source 1..21: mol_type = other RNA
gaccagagcgggagggtagga

SEQ ID NO: 11783 - RNA, 21 nt, synthetic construct
  source 1..21: mol_type = other RNA
gacccagaggtgctaggacat

SEQ ID NO: 11784 - RNA, 21 nt, synthetic construct
  source 1..21: mol_type = other RNA
gaccccaagcgcccctccacg

SEQ ID NO: 11785 - RNA, 21 nt, synthetic construct
  source 1..21: mol_type = other RNA
gaccctcccgtcgccgtaggc

SEQ ID NO: 11786 - RNA, 21 nt, synthetic construct
  source 1..21: mol_type = other RNA
gacctcaagccatcctcccgc

SEQ ID NO: 11787 - RNA, 21 nt, synthetic construct
  source 1..21: mol_type = other RNA
gacctttggcctacggcgacg

SEQ ID NO: 11788 - RNA, 21 nt, synthetic construct
  source 1..21: mol_type = other RNA
gacgaagtccacagctctcca

SEQ ID NO: 11789 - RNA, 21 nt, synthetic construct
  source 1..21: mol_type = other RNA
gacgagcctacccgtccccca

SEQ ID NO: 11790 - RNA, 21 nt, synthetic construct
  source 1..21: mol_type = other RNA
gacgcaaagcacataaagtcc

SEQ ID NO: 11791 - RNA, 21 nt, synthetic construct
  source 1..21: mol_type = other RNA
gacgccctaaactttgtcccg

SEQ ID NO: 11792 - RNA, 21 nt, synthetic construct
  source 1..21: mol_type = other RNA
gacgcctcccccagaccccaa

SEQ ID NO: 11793 - RNA, 21 nt, synthetic construct
  source 1..21: mol_type = other RNA
gacgcgcgctacttgcccctt

SEQ ID NO: 11794 - RNA, 21 nt, synthetic construct
  source 1..21: mol_type = other RNA
gacgcttatcgacgccctaaa

SEQ ID NO: 11795 - RNA, 21 nt, synthetic construct
  source 1..21: mol_type = other RNA
gacgggagggtcgggacaaag

SEQ ID NO: 11796 - RNA, 21 nt, synthetic construct
  source 1..21: mol_type = other RNA
gacgggtaggctcgtcccaaa

SEQ ID NO: 11797 - RNA, 21 nt, synthetic construct
  source 1..21: mol_type = other RNA
gacgtttgtagaatgcttggc

SEQ ID NO: 11798 - RNA, 21 nt, synthetic construct
  source 1..21: mol_type = other RNA
gactagccccacggcgggcca

SEQ ID NO: 11799 - RNA, 21 nt, synthetic construct
  source 1..21: mol_type = other RNA
gactggagagctgtggacttc

SEQ ID NO: 11800 - RNA, 21 nt, synthetic construct
  source 1..21: mol_type = other RNA
gacttcaatctcgattgctgc

SEQ ID NO: 11801 - RNA, 21 nt, synthetic construct
  source 1..21: mol_type = other RNA
gacttcccttctccaagttct

SEQ ID NO: 11802 - RNA, 21 nt, synthetic construct
  source 1..21: mol_type = other RNA
gacttcgtctaggcgcccgct

SEQ ID NO: 11803 - RNA, 21 nt, synthetic construct
  source 1..21: mol_type = other RNA
gactttatgtgctttgcgtca

SEQ ID NO: 11804 - RNA, 21 nt, synthetic construct
  source 1..21: mol_type = other RNA
gagaaaccctcccccaacctc

SEQ ID NO: 11805 - RNA, 21 nt, synthetic construct
  source 1..21: mol_type = other RNA
gagaacttggagaagggaagt

SEQ ID NO: 11806 - RNA, 21 nt, synthetic construct
  source 1..21: mol_type = other RNA
gagaagggaagtcacggagcg

SEQ ID NO: 11807 - RNA, 21 nt, synthetic construct
  source 1..21: mol_type = other RNA
gagaatctcacgcagaaggca

SEQ ID NO: 11808 - RNA, 21 nt, synthetic construct
  source 1..21: mol_type = other RNA
gagacctttggcctacggcga

SEQ ID NO: 11809 - RNA, 21 nt, synthetic construct
  source 1..21: mol_type = other RNA
gagagacagggtctcgctctg

SEQ ID NO: 11810 - RNA, 21 nt, synthetic construct
  source 1..21: mol_type = other RNA
gagagagcacagcgagggcca

SEQ ID NO: 11811 - RNA, 21 nt, synthetic construct
  source 1..21: mol_type = other RNA
gagagcacagcgagggccaca

SEQ ID NO: 11812 - RNA, 21 nt, synthetic construct
  source 1..21: mol_type = other RNA
gagagctgtggacttcgtcta

SEQ ID NO: 11813 - RNA, 21 nt, synthetic construct
  source 1..21: mol_type = other RNA
gagaggaaggaccagagcggg

SEQ ID NO: 11814 - RNA, 21 nt, synthetic construct
  source 1..21: mol_type = other RNA
gagaggcagaagataaccata

SEQ ID NO: 11815 - RNA, 21 nt, synthetic construct
  source 1..21: mol_type = other RNA
gagatccagccctggactagc

SEQ ID NO: 11816 - RNA, 21 nt, synthetic construct
  source 1..21: mol_type = other RNA
gagatcctcccgcctcagcca

SEQ ID NO: 11817 - RNA, 21 nt, synthetic construct
  source 1..21: mol_type = other RNA
gagattctccagagcaaactg

SEQ ID NO: 11818 - RNA, 21 nt, synthetic construct
  source 1..21: mol_type = other RNA
gagattgaagtcaagcctaac

SEQ ID NO: 11819 - RNA, 21 nt, synthetic construct
  source 1..21: mol_type = other RNA
gagcaaactgggcggcatggg

SEQ ID NO: 11820 - RNA, 21 nt, synthetic construct
  source 1..21: mol_type = other RNA
gagcacagcgagggccacaga

SEQ ID NO: 11821 - RNA, 21 nt, synthetic construct
  source 1..21: mol_type = other RNA
gagcagctgggaccacaggca

SEQ ID NO: 11822 - RNA, 21 nt, synthetic construct
  source 1..21: mol_type = other RNA
gagcaggggagacctttggcc

SEQ ID NO: 11823 - RNA, 21 nt, synthetic construct
  source 1..21: mol_type = other RNA
gagccaaagaggaagccctct

SEQ ID NO: 11824 - RNA, 21 nt, synthetic construct
  source 1..21: mol_type = other RNA
gagccaccacacccggctaat

SEQ ID NO: 11825 - RNA, 21 nt, synthetic construct
  source 1..21: mol_type = other RNA
gagccagaggccccgcgaaag

SEQ ID NO: 11826 - RNA, 21 nt, synthetic construct
  source 1..21: mol_type = other RNA
gagccgcagcagacaggctta

SEQ ID NO: 11827 - RNA, 21 nt, synthetic construct
  source 1..21: mol_type = other RNA
gagcctacccgtcccccactc

SEQ ID NO: 11828 - RNA, 21 nt, synthetic construct
  source 1..21: mol_type = other RNA
gagcgagagagcacagcgagg

SEQ ID NO: 11829 - RNA, 21 nt, synthetic construct
  source 1..21: mol_type = other RNA
gagcgcatgccttttggctgt

SEQ ID NO: 11830 - RNA, 21 nt, synthetic construct
  source 1..21: mol_type = other RNA
gagcgccgaggttgggggagg

SEQ ID NO: 11831 - RNA, 21 nt, synthetic construct
  source 1..21: mol_type = other RNA
gagcggaagagaaaccctccc

SEQ ID NO: 11832 - RNA, 21 nt, synthetic construct
  source 1..21: mol_type = other RNA
gagcgggagaggaaggaccag

SEQ ID NO: 11833 - RNA, 21 nt, synthetic construct
  source 1..21: mol_type = other RNA
gagctatcatggcgccagtgc

SEQ ID NO: 11834 - RNA, 21 nt, synthetic construct
  source 1..21: mol_type = other RNA
gagctgtggacttcgtctagg

SEQ ID NO: 11835 - RNA, 21 nt, synthetic construct
  source 1..21: mol_type = other RNA
gagcttaggcttttgagctat

SEQ ID NO: 11836 - RNA, 21 nt, synthetic construct
  source 1..21: mol_type = other RNA
gaggaaacagcacgcgacgtt

SEQ ID NO: 11837 - RNA, 21 nt, synthetic construct
  source 1..21: mol_type = other RNA
gaggaagccctctgtacgaaa

SEQ ID NO: 11838 - RNA, 21 nt, synthetic construct
  source 1..21: mol_type = other RNA
gaggaaggaccagagcgggag

SEQ ID NO: 11839 - RNA, 21 nt, synthetic construct
  source 1..21: mol_type = other RNA
gaggatctcttgagcttaggc

SEQ ID NO: 11840 - RNA, 21 nt, synthetic construct
  source 1..21: mol_type = other RNA
gaggatggcttgaggtccgta

SEQ ID NO: 11841 - RNA, 21 nt, synthetic construct
  source 1..21: mol_type = other RNA
gaggcacagtacatcttggaa

SEQ ID NO: 11842 - RNA, 21 nt, synthetic construct
  source 1..21: mol_type = other RNA
gaggcagaagataaccatagt

SEQ ID NO: 11843 - RNA, 21 nt, synthetic construct
  source 1..21: mol_type = other RNA
gaggccccgcgaaagagcgga

SEQ ID NO: 11844 - RNA, 21 nt, synthetic construct
  source 1..21: mol_type = other RNA
gaggccgaggcgggaggatgg

SEQ ID NO: 11845 - RNA, 21 nt, synthetic construct
  source 1..21: mol_type = other RNA
gaggcgggaggatctcttgag

SEQ ID NO: 11846 - RNA, 21 nt, synthetic construct
  source 1..21: mol_type = other RNA
gaggcgggaggatggcttgag

SEQ ID NO: 11847 - RNA, 21 nt, synthetic construct
  source 1..21: mol_type = other RNA
gaggcgtcgcccgggtaagcc

SEQ ID NO: 11848 - RNA, 21 nt, synthetic construct
  source 1..21: mol_type = other RNA
gagggccacagagggtgcaga

SEQ ID NO: 11849 - RNA, 21 nt, synthetic construct
  source 1..21: mol_type = other RNA
gagggcttcctctttggctct

SEQ ID NO: 11850 - RNA, 21 nt, synthetic construct
  source 1..21: mol_type = other RNA
gaggggcgcttggggtctggg

SEQ ID NO: 11851 - RNA, 21 nt, synthetic construct
  source 1..21: mol_type = other RNA
gagggggttgggcgtggtagc

SEQ ID NO: 11852 - RNA, 21 nt, synthetic construct
  source 1..21: mol_type = other RNA
gagggtcgggacaaagtttag

SEQ ID NO: 11853 - RNA, 21 nt, synthetic construct
  source 1..21: mol_type = other RNA
gagggtgcagagcgggagagg

SEQ ID NO: 11854 - RNA, 21 nt, synthetic construct
  source 1..21: mol_type = other RNA
gagggtttctcttccgctctt

SEQ ID NO: 11855 - RNA, 21 nt, synthetic construct
  source 1..21: mol_type = other RNA
gaggtccgtagttgagaccag

SEQ ID NO: 11856 - RNA, 21 nt, synthetic construct
  source 1..21: mol_type = other RNA
gaggtgctaggacatgcgaac

SEQ ID NO: 11857 - RNA, 21 nt, synthetic construct
  source 1..21: mol_type = other RNA
gaggttgggggagggtttctc

SEQ ID NO: 11858 - RNA, 21 nt, synthetic construct
  source 1..21: mol_type = other RNA
gaggtttgtgaacgcgtggag

SEQ ID NO: 11859 - RNA, 21 nt, synthetic construct
  source 1..21: mol_type = other RNA
gagtctctcctaccctcccgc

SEQ ID NO: 11860 - RNA, 21 nt, synthetic construct
  source 1..21: mol_type = other RNA
gagtgcactggcgccatgata

SEQ ID NO: 11861 - RNA, 21 nt, synthetic construct
  source 1..21: mol_type = other RNA
gagtggggaagggggtgcgca

SEQ ID NO: 11862 - RNA, 21 nt, synthetic construct
  source 1..21: mol_type = other RNA
gagtgggggacgggtaggctc

SEQ ID NO: 11863 - RNA, 21 nt, synthetic construct
  source 1..21: mol_type = other RNA
gataaatggcagcaatcgaga

SEQ ID NO: 11864 - RNA, 21 nt, synthetic construct
  source 1..21: mol_type = other RNA
gataaccatagtagttatcta

SEQ ID NO: 11865 - RNA, 21 nt, synthetic construct
  source 1..21: mol_type = other RNA
gataactactatggttatctt

SEQ ID NO: 11866 - RNA, 21 nt, synthetic construct
  source 1..21: mol_type = other RNA
gataagcgtcagagcgccgag

SEQ ID NO: 11867 - RNA, 21 nt, synthetic construct
  source 1..21: mol_type = other RNA
gatacaaagcggtttcgaata

SEQ ID NO: 11868 - RNA, 21 nt, synthetic construct
  source 1..21: mol_type = other RNA
gatagctcaaaagcctaagct

SEQ ID NO: 11869 - RNA, 21 nt, synthetic construct
  source 1..21: mol_type = other RNA
gatccagccctggactagccc

SEQ ID NO: 11870 - RNA, 21 nt, synthetic construct
  source 1..21: mol_type = other RNA
gatcctcccgcctcagccacc

SEQ ID NO: 11871 - RNA, 21 nt, synthetic construct
  source 1..21: mol_type = other RNA
gatctcggggaagcggcgggg

SEQ ID NO: 11872 - RNA, 21 nt, synthetic construct
  source 1..21: mol_type = other RNA
gatctcttgagcttaggcttt

SEQ ID NO: 11873 - RNA, 21 nt, synthetic construct
  source 1..21: mol_type = other RNA
gatgaagaaactaaggcaccg

SEQ ID NO: 11874 - RNA, 21 nt, synthetic construct
  source 1..21: mol_type = other RNA
gatggcttgaggtccgtagtt

SEQ ID NO: 11875 - RNA, 21 nt, synthetic construct
  source 1..21: mol_type = other RNA
gatgggaacaaataagttaat

SEQ ID NO: 11876 - RNA, 21 nt, synthetic construct
  source 1..21: mol_type = other RNA
gatgtactgtgcctcttactt

SEQ ID NO: 11877 - RNA, 21 nt, synthetic construct
  source 1..21: mol_type = other RNA
gatgtcaataacgggtagttc

SEQ ID NO: 11878 - RNA, 21 nt, synthetic construct
  source 1..21: mol_type = other RNA
gattacaggcgtaagctacca

SEQ ID NO: 11879 - RNA, 21 nt, synthetic construct
  source 1..21: mol_type = other RNA
gattctccagagcaaactggg

SEQ ID NO: 11880 - RNA, 21 nt, synthetic construct
  source 1..21: mol_type = other RNA
gattgaagtcaagcctaacca

SEQ ID NO: 11881 - RNA, 21 nt, synthetic construct
  source 1..21: mol_type = other RNA
gattgctgccatttatcccct

SEQ ID NO: 11882 - RNA, 21 nt, synthetic construct
  source 1..21: mol_type = other RNA
gcaaaagccctggttaggctt

SEQ ID NO: 11883 - RNA, 21 nt, synthetic construct
  source 1..21: mol_type = other RNA
gcaaactgggcggcatgggcc

SEQ ID NO: 11884 - RNA, 21 nt, synthetic construct
  source 1..21: mol_type = other RNA
gcaaagagccaaagaggaagc

SEQ ID NO: 11885 - RNA, 21 nt, synthetic construct
  source 1..21: mol_type = other RNA
gcaaagcacataaagtccttg

SEQ ID NO: 11886 - RNA, 21 nt, synthetic construct
  source 1..21: mol_type = other RNA
gcaagtagcgcgcgtcccggg

SEQ ID NO: 11887 - RNA, 21 nt, synthetic construct
  source 1..21: mol_type = other RNA
gcaatcgagattgaagtcaag

SEQ ID NO: 11888 - RNA, 21 nt, synthetic construct
  source 1..21: mol_type = other RNA
gcacacagaaagatgtcaata

SEQ ID NO: 11889 - RNA, 21 nt, synthetic construct
  source 1..21: mol_type = other RNA
gcacagcgagggccacagagg

SEQ ID NO: 11890 - RNA, 21 nt, synthetic construct
  source 1..21: mol_type = other RNA
gcacagtacatcttggaaaca

SEQ ID NO: 11891 - RNA, 21 nt, synthetic construct
  source 1..21: mol_type = other RNA
gcacataaagtccttggcaca

SEQ ID NO: 11892 - RNA, 21 nt, synthetic construct
  source 1..21: mol_type = other RNA
gcacccccttccccactccca

SEQ ID NO: 11893 - RNA, 21 nt, synthetic construct
  source 1..21: mol_type = other RNA
gcacccgggacgcgcgctact

SEQ ID NO: 11894 - RNA, 21 nt, synthetic construct
  source 1..21: mol_type = other RNA
gcaccctctgtggccctcgct

SEQ ID NO: 11895 - RNA, 21 nt, synthetic construct
  source 1..21: mol_type = other RNA
gcaccgagattttaagaaact

SEQ ID NO: 11896 - RNA, 21 nt, synthetic construct
  source 1..21: mol_type = other RNA
gcacctctgggtctatgtggg

SEQ ID NO: 11897 - RNA, 21 nt, synthetic construct
  source 1..21: mol_type = other RNA
gcacgaattacagccaaaagg

SEQ ID NO: 11898 - RNA, 21 nt, synthetic construct
  source 1..21: mol_type = other RNA
gcacgcgacgtttgtagaatg

SEQ ID NO: 11899 - RNA, 21 nt, synthetic construct
  source 1..21: mol_type = other RNA
gcactggcgccatgatagctc

SEQ ID NO: 11900 - RNA, 21 nt, synthetic construct
  source 1..21: mol_type = other RNA
gcacttagggaggccgaggcg

SEQ ID NO: 11901 - RNA, 21 nt, synthetic construct
  source 1..21: mol_type = other RNA
gcagaagataaccatagtagt

SEQ ID NO: 11902 - RNA, 21 nt, synthetic construct
  source 1..21: mol_type = other RNA
gcagaaggcaggcgtttttct

SEQ ID NO: 11903 - RNA, 21 nt, synthetic construct
  source 1..21: mol_type = other RNA
gcagacaggcttacccgggcg

SEQ ID NO: 11904 - RNA, 21 nt, synthetic construct
  source 1..21: mol_type = other RNA
gcagagccgcagcagacaggc

SEQ ID NO: 11905 - RNA, 21 nt, synthetic construct
  source 1..21: mol_type = other RNA
gcagagcgggagaggaaggac

SEQ ID NO: 11906 - RNA, 21 nt, synthetic construct
  source 1..21: mol_type = other RNA
gcagcaatcgagattgaagtc

SEQ ID NO: 11907 - RNA, 21 nt, synthetic construct
  source 1..21: mol_type = other RNA
gcagcagacaggcttacccgg

SEQ ID NO: 11908 - RNA, 21 nt, synthetic construct
  source 1..21: mol_type = other RNA
gcagctggagtgggggacggg

SEQ ID NO: 11909 - RNA, 21 nt, synthetic construct
  source 1..21: mol_type = other RNA
gcagctgggaccacaggcacg

SEQ ID NO: 11910 - RNA, 21 nt, synthetic construct
  source 1..21: mol_type = other RNA
gcaggcgtttttcttaaaaaa

SEQ ID NO: 11911 - RNA, 21 nt, synthetic construct
  source 1..21: mol_type = other RNA
gcaggggagacctttggccta

SEQ ID NO: 11912 - RNA, 21 nt, synthetic construct
  source 1..21: mol_type = other RNA
gcatgccttttggctgtaatt

SEQ ID NO: 11913 - RNA, 21 nt, synthetic construct
  source 1..21: mol_type = other RNA
gcatgcgctcccgcaaaagcc

SEQ ID NO: 11914 - RNA, 21 nt, synthetic construct
  source 1..21: mol_type = other RNA
gcatgggccctgtggtctttt

SEQ ID NO: 11915 - RNA, 21 nt, synthetic construct
  source 1..21: mol_type = other RNA
gcatgtcctagcacctctggg

SEQ ID NO: 11916 - RNA, 21 nt, synthetic construct
  source 1..21: mol_type = other RNA
gcattctacaaacgtcgcgtg

SEQ ID NO: 11917 - RNA, 21 nt, synthetic construct
  source 1..21: mol_type = other RNA
gccaaaaggcatgcgctcccg

SEQ ID NO: 11918 - RNA, 21 nt, synthetic construct
  source 1..21: mol_type = other RNA
gccaaagaggaagccctctgt

SEQ ID NO: 11919 - RNA, 21 nt, synthetic construct
  source 1..21: mol_type = other RNA
gccaaaggtctcccctgctcc

SEQ ID NO: 11920 - RNA, 21 nt, synthetic construct
  source 1..21: mol_type = other RNA
gccaacatggtgaagcctggt

SEQ ID NO: 11921 - RNA, 21 nt, synthetic construct
  source 1..21: mol_type = other RNA
gccaagcattctacaaacgtc

SEQ ID NO: 11922 - RNA, 21 nt, synthetic construct
  source 1..21: mol_type = other RNA
gccaaggactttatgtgcttt

SEQ ID NO: 11923 - RNA, 21 nt, synthetic construct
  source 1..21: mol_type = other RNA
gccacaccgtggggaggaaac

SEQ ID NO: 11924 - RNA, 21 nt, synthetic construct
  source 1..21: mol_type = other RNA
gccacagagggtgcagagcgg

SEQ ID NO: 11925 - RNA, 21 nt, synthetic construct
  source 1..21: mol_type = other RNA
gccaccaaggagaacttggag

SEQ ID NO: 11926 - RNA, 21 nt, synthetic construct
  source 1..21: mol_type = other RNA
gccaccggagcagctgggacc

SEQ ID NO: 11927 - RNA, 21 nt, synthetic construct
  source 1..21: mol_type = other RNA
gccagaggccccgcgaaagag

SEQ ID NO: 11928 - RNA, 21 nt, synthetic construct
  source 1..21: mol_type = other RNA
gccaggctggtctcaactacg

SEQ ID NO: 11929 - RNA, 21 nt, synthetic construct
  source 1..21: mol_type = other RNA
gccatagataactactatggt

SEQ ID NO: 11930 - RNA, 21 nt, synthetic construct
  source 1..21: mol_type = other RNA
gccatcctcccgcctcggcct

SEQ ID NO: 11931 - RNA, 21 nt, synthetic construct
  source 1..21: mol_type = other RNA
gccatgatagctcaaaagcct

SEQ ID NO: 11932 - RNA, 21 nt, synthetic construct
  source 1..21: mol_type = other RNA
gccatttatcccctgtgtaat

SEQ ID NO: 11933 - RNA, 21 nt, synthetic construct
  source 1..21: mol_type = other RNA
gcccaaccccctcatgttttc

SEQ ID NO: 11934 - RNA, 21 nt, synthetic construct
  source 1..21: mol_type = other RNA
gcccacgctggagtgcactgg

SEQ ID NO: 11935 - RNA, 21 nt, synthetic construct
  source 1..21: mol_type = other RNA
gcccagtttgctctggagaat

SEQ ID NO: 11936 - RNA, 21 nt, synthetic construct
  source 1..21: mol_type = other RNA
gcccatgccgcccagtttgct

SEQ ID NO: 11937 - RNA, 21 nt, synthetic construct
  source 1..21: mol_type = other RNA
gccccacatagacccagaggt

SEQ ID NO: 11938 - RNA, 21 nt, synthetic construct
  source 1..21: mol_type = other RNA
gccccgcgaaagagcggaaga

SEQ ID NO: 11939 - RNA, 21 nt, synthetic construct
  source 1..21: mol_type = other RNA
gcccctccacgcgttcacaaa

SEQ ID NO: 11940 - RNA, 21 nt, synthetic construct
  source 1..21: mol_type = other RNA
gcccctttcggcggggagcag

SEQ ID NO: 11941 - RNA, 21 nt, synthetic construct
  source 1..21: mol_type = other RNA
gcccgccgtggggctagtcca

SEQ ID NO: 11942 - RNA, 21 nt, synthetic construct
  source 1..21: mol_type = other RNA
gcccgctaagttcgcatgtcc

SEQ ID NO: 11943 - RNA, 21 nt, synthetic construct
  source 1..21: mol_type = other RNA
gcccgggtaagcctgtctgct

SEQ ID NO: 11944 - RNA, 21 nt, synthetic construct
  source 1..21: mol_type = other RNA
gccctaaactttgtcccgacc

SEQ ID NO: 11945 - RNA, 21 nt, synthetic construct
  source 1..21: mol_type = other RNA
gccctcgctgtgctctctcgc

SEQ ID NO: 11946 - RNA, 21 nt, synthetic construct
  source 1..21: mol_type = other RNA
gccctctgtacgaaaagacca

SEQ ID NO: 11947 - RNA, 21 nt, synthetic construct
  source 1..21: mol_type = other RNA
gccctggactagccccacggc

SEQ ID NO: 11948 - RNA, 21 nt, synthetic construct
  source 1..21: mol_type = other RNA
gccctggttaggcttgacttc

SEQ ID NO: 11949 - RNA, 21 nt, synthetic construct
  source 1..21: mol_type = other RNA
gccctgtggtcttttcgtaca

SEQ ID NO: 11950 - RNA, 21 nt, synthetic construct
  source 1..21: mol_type = other RNA
gccgaaaggggcaagtagcgc

SEQ ID NO: 11951 - RNA, 21 nt, synthetic construct
  source 1..21: mol_type = other RNA
gccgaggcgggaggatggctt

SEQ ID NO: 11952 - RNA, 21 nt, synthetic construct
  source 1..21: mol_type = other RNA
gccgaggttgggggagggttt

SEQ ID NO: 11953 - RNA, 21 nt, synthetic construct
  source 1..21: mol_type = other RNA
gccgcagcagacaggcttacc

SEQ ID NO: 11954 - RNA, 21 nt, synthetic construct
  source 1..21: mol_type = other RNA
gccgcccagtttgctctggag

SEQ ID NO: 11955 - RNA, 21 nt, synthetic construct
  source 1..21: mol_type = other RNA
gccgcgcctttgggacgagcc

SEQ ID NO: 11956 - RNA, 21 nt, synthetic construct
  source 1..21: mol_type = other RNA
gccgcttccccgagatccagc

SEQ ID NO: 11957 - RNA, 21 nt, synthetic construct
  source 1..21: mol_type = other RNA
gccgggtgtggtggctcgtgc

SEQ ID NO: 11958 - RNA, 21 nt, synthetic construct
  source 1..21: mol_type = other RNA
gccgtaggccaaaggtctccc

SEQ ID NO: 11959 - RNA, 21 nt, synthetic construct
  source 1..21: mol_type = other RNA
gccgtggggctagtccagggc

SEQ ID NO: 11960 - RNA, 21 nt, synthetic construct
  source 1..21: mol_type = other RNA
gcctaaccagggcttttgcgg

SEQ ID NO: 11961 - RNA, 21 nt, synthetic construct
  source 1..21: mol_type = other RNA
gcctaagctcaagagatcctc

SEQ ID NO: 11962 - RNA, 21 nt, synthetic construct
  source 1..21: mol_type = other RNA
gcctacccgtcccccactcca

SEQ ID NO: 11963 - RNA, 21 nt, synthetic construct
  source 1..21: mol_type = other RNA
gcctacggcgacgggagggtc

SEQ ID NO: 11964 - RNA, 21 nt, synthetic construct
  source 1..21: mol_type = other RNA
gcctagacgaagtccacagct

SEQ ID NO: 11965 - RNA, 21 nt, synthetic construct
  source 1..21: mol_type = other RNA
gcctcagccaccggagcagct

SEQ ID NO: 11966 - RNA, 21 nt, synthetic construct
  source 1..21: mol_type = other RNA
gcctcccccagaccccaagcg

SEQ ID NO: 11967 - RNA, 21 nt, synthetic construct
  source 1..21: mol_type = other RNA
gcctctcacagatgaagaaac

SEQ ID NO: 11968 - RNA, 21 nt, synthetic construct
  source 1..21: mol_type = other RNA
gcctctggctcccccagcgca

SEQ ID NO: 11969 - RNA, 21 nt, synthetic construct
  source 1..21: mol_type = other RNA
gcctcttactttcggttttga

SEQ ID NO: 11970 - RNA, 21 nt, synthetic construct
  source 1..21: mol_type = other RNA
gcctgccttctgcgtgagatt

SEQ ID NO: 11971 - RNA, 21 nt, synthetic construct
  source 1..21: mol_type = other RNA
gcctgggagtggggaaggggg

SEQ ID NO: 11972 - RNA, 21 nt, synthetic construct
  source 1..21: mol_type = other RNA
gcctggtctctacaaaaaata

SEQ ID NO: 11973 - RNA, 21 nt, synthetic construct
  source 1..21: mol_type = other RNA
gcctggttgtttccaagatgt

SEQ ID NO: 11974 - RNA, 21 nt, synthetic construct
  source 1..21: mol_type = other RNA
gcctgtctgctgcggctctgc

SEQ ID NO: 11975 - RNA, 21 nt, synthetic construct
  source 1..21: mol_type = other RNA
gcctgtggtcccagctgctcc

SEQ ID NO: 11976 - RNA, 21 nt, synthetic construct
  source 1..21: mol_type = other RNA
gccttagtttcttcatctgtg

SEQ ID NO: 11977 - RNA, 21 nt, synthetic construct
  source 1..21: mol_type = other RNA
gccttctgcgtgagattctcc

SEQ ID NO: 11978 - RNA, 21 nt, synthetic construct
  source 1..21: mol_type = other RNA
gcctttgggacgagcctaccc

SEQ ID NO: 11979 - RNA, 21 nt, synthetic construct
  source 1..21: mol_type = other RNA
gccttttggctgtaattcgtg

SEQ ID NO: 11980 - RNA, 21 nt, synthetic construct
  source 1..21: mol_type = other RNA
gcgaaagagcggaagagaaac

SEQ ID NO: 11981 - RNA, 21 nt, synthetic construct
  source 1..21: mol_type = other RNA
gcgaacttagcgggcgcctag

SEQ ID NO: 11982 - RNA, 21 nt, synthetic construct
  source 1..21: mol_type = other RNA
gcgacgggagggtcgggacaa

SEQ ID NO: 11983 - RNA, 21 nt, synthetic construct
  source 1..21: mol_type = other RNA
gcgacgtttgtagaatgcttg

SEQ ID NO: 11984 - RNA, 21 nt, synthetic construct
  source 1..21: mol_type = other RNA
gcgagagagcacagcgagggc

SEQ ID NO: 11985 - RNA, 21 nt, synthetic construct
  source 1..21: mol_type = other RNA
gcgagggccacagagggtgca

SEQ ID NO: 11986 - RNA, 21 nt, synthetic construct
  source 1..21: mol_type = other RNA
gcgcacccccttccccactcc

SEQ ID NO: 11987 - RNA, 21 nt, synthetic construct
  source 1..21: mol_type = other RNA
gcgcagctggagtgggggacg

SEQ ID NO: 11988 - RNA, 21 nt, synthetic construct
  source 1..21: mol_type = other RNA
gcgcatgccttttggctgtaa

SEQ ID NO: 11989 - RNA, 21 nt, synthetic construct
  source 1..21: mol_type = other RNA
gcgccagtgcactccagcgtg

SEQ ID NO: 11990 - RNA, 21 nt, synthetic construct
  source 1..21: mol_type = other RNA
gcgccatgatagctcaaaagc

SEQ ID NO: 11991 - RNA, 21 nt, synthetic construct
  source 1..21: mol_type = other RNA
gcgcccctccacgcgttcaca

SEQ ID NO: 11992 - RNA, 21 nt, synthetic construct
  source 1..21: mol_type = other RNA
gcgcccgctaagttcgcatgt

SEQ ID NO: 11993 - RNA, 21 nt, synthetic construct
  source 1..21: mol_type = other RNA
gcgccgaggttgggggagggt

SEQ ID NO: 11994 - RNA, 21 nt, synthetic construct
  source 1..21: mol_type = other RNA
gcgccgcgcctttgggacgag

SEQ ID NO: 11995 - RNA, 21 nt, synthetic construct
  source 1..21: mol_type = other RNA
gcgcctagacgaagtccacag

SEQ ID NO: 11996 - RNA, 21 nt, synthetic construct
  source 1..21: mol_type = other RNA
gcgcctttgggacgagcctac

SEQ ID NO: 11997 - RNA, 21 nt, synthetic construct
  source 1..21: mol_type = other RNA
gcgcgctacttgcccctttcg

SEQ ID NO: 11998 - RNA, 21 nt, synthetic construct
  source 1..21: mol_type = other RNA
gcgcggcgctgaggtttgtga

SEQ ID NO: 11999 - RNA, 21 nt, synthetic construct
  source 1..21: mol_type = other RNA
gcgctacttgcccctttcggc

SEQ ID NO: 12000 - RNA, 21 nt, synthetic construct
  source 1..21: mol_type = other RNA
gcgctcccgcaaaagccctgg

SEQ ID NO: 12001 - RNA, 21 nt, synthetic construct
  source 1..21: mol_type = other RNA
gcgctctgacgcttatcgacg

SEQ ID NO: 12002 - RNA, 21 nt, synthetic construct
  source 1..21: mol_type = other RNA
gcgctgaggtttgtgaacgcg

SEQ ID NO: 12003 - RNA, 21 nt, synthetic construct
  source 1..21: mol_type = other RNA
gcgcttggggtctgggggagg

SEQ ID NO: 12004 - RNA, 21 nt, synthetic construct
  source 1..21: mol_type = other RNA
gcggaagagaaaccctccccc

SEQ ID NO: 12005 - RNA, 21 nt, synthetic construct
  source 1..21: mol_type = other RNA
gcggaagataactgttttcaa

SEQ ID NO: 12006 - RNA, 21 nt, synthetic construct
  source 1..21: mol_type = other RNA
gcggcatgggccctgtggtct

SEQ ID NO: 12007 - RNA, 21 nt, synthetic construct
  source 1..21: mol_type = other RNA
gcggcgctgaggtttgtgaac

SEQ ID NO: 12008 - RNA, 21 nt, synthetic construct
  source 1..21: mol_type = other RNA
gcggctctgcttcccttagac

SEQ ID NO: 12009 - RNA, 21 nt, synthetic construct
  source 1..21: mol_type = other RNA
gcgggagaggaaggaccagag

SEQ ID NO: 12010 - RNA, 21 nt, synthetic construct
  source 1..21: mol_type = other RNA
gcgggagcgcatgccttttgg

SEQ ID NO: 12011 - RNA, 21 nt, synthetic construct
  source 1..21: mol_type = other RNA
gcgggaggatctcttgagctt

SEQ ID NO: 12012 - RNA, 21 nt, synthetic construct
  source 1..21: mol_type = other RNA
gcgggaggatggcttgaggtc

SEQ ID NO: 12013 - RNA, 21 nt, synthetic construct
  source 1..21: mol_type = other RNA
gcgggccaccaaggagaactt

SEQ ID NO: 12014 - RNA, 21 nt, synthetic construct
  source 1..21: mol_type = other RNA
gcgggcgcctagacgaagtcc

SEQ ID NO: 12015 - RNA, 21 nt, synthetic construct
  source 1..21: mol_type = other RNA
gcggggagcaggggagacctt

SEQ ID NO: 12016 - RNA, 21 nt, synthetic construct
  source 1..21: mol_type = other RNA
gcggtttcgaataattaactt

SEQ ID NO: 12017 - RNA, 21 nt, synthetic construct
  source 1..21: mol_type = other RNA
gcgtaagctaccacgcccaac

SEQ ID NO: 12018 - RNA, 21 nt, synthetic construct
  source 1..21: mol_type = other RNA
gcgtcagagcgccgaggttgg

SEQ ID NO: 12019 - RNA, 21 nt, synthetic construct
  source 1..21: mol_type = other RNA
gcgtcatttaattttgaaaac

SEQ ID NO: 12020 - RNA, 21 nt, synthetic construct
  source 1..21: mol_type = other RNA
gcgtcgataagcgtcagagcg

SEQ ID NO: 12021 - RNA, 21 nt, synthetic construct
  source 1..21: mol_type = other RNA
gcgtcgcccgggtaagcctgt

SEQ ID NO: 12022 - RNA, 21 nt, synthetic construct
  source 1..21: mol_type = other RNA
gcgtgagattctccagagcaa

SEQ ID NO: 12023 - RNA, 21 nt, synthetic construct
  source 1..21: mol_type = other RNA
gcgtgctgtttcctccccacg

SEQ ID NO: 12024 - RNA, 21 nt, synthetic construct
  source 1..21: mol_type = other RNA
gcgtggaggggcgcttggggt

SEQ ID NO: 12025 - RNA, 21 nt, synthetic construct
  source 1..21: mol_type = other RNA
gcgttcacaaacctcagcgcc

SEQ ID NO: 12026 - RNA, 21 nt, synthetic construct
  source 1..21: mol_type = other RNA
gctaagttcgcatgtcctagc

SEQ ID NO: 12027 - RNA, 21 nt, synthetic construct
  source 1..21: mol_type = other RNA
gctaccacgcccaaccccctc

SEQ ID NO: 12028 - RNA, 21 nt, synthetic construct
  source 1..21: mol_type = other RNA
gctacttgcccctttcggcgg

SEQ ID NO: 12029 - RNA, 21 nt, synthetic construct
  source 1..21: mol_type = other RNA
gctaggacatgcgaacttagc

SEQ ID NO: 12030 - RNA, 21 nt, synthetic construct
  source 1..21: mol_type = other RNA
gctagtccagggctggatctc

SEQ ID NO: 12031 - RNA, 21 nt, synthetic construct
  source 1..21: mol_type = other RNA
gctatcatggcgccagtgcac

SEQ ID NO: 12032 - RNA, 21 nt, synthetic construct
  source 1..21: mol_type = other RNA
gctcaaaagcctaagctcaag

SEQ ID NO: 12033 - RNA, 21 nt, synthetic construct
  source 1..21: mol_type = other RNA
gctcccccagcgcagctggag

SEQ ID NO: 12034 - RNA, 21 nt, synthetic construct
  source 1..21: mol_type = other RNA
gctccccgccgaaaggggcaa

SEQ ID NO: 12035 - RNA, 21 nt, synthetic construct
  source 1..21: mol_type = other RNA
gctcccgcaaaagccctggtt

SEQ ID NO: 12036 - RNA, 21 nt, synthetic construct
  source 1..21: mol_type = other RNA
gctccggtggctgaggcggga

SEQ ID NO: 12037 - RNA, 21 nt, synthetic construct
  source 1..21: mol_type = other RNA
gctccgtgacttcccttctcc

SEQ ID NO: 12038 - RNA, 21 nt, synthetic construct
  source 1..21: mol_type = other RNA
gctcgtcccaaaggcgcggcg

SEQ ID NO: 12039 - RNA, 21 nt, synthetic construct
  source 1..21: mol_type = other RNA
gctcgtgcctgtggtcccagc

SEQ ID NO: 12040 - RNA, 21 nt, synthetic construct
  source 1..21: mol_type = other RNA
gctctccagtctaagggaagc

SEQ ID NO: 12041 - RNA, 21 nt, synthetic construct
  source 1..21: mol_type = other RNA
gctctctcgctccgtgacttc

SEQ ID NO: 12042 - RNA, 21 nt, synthetic construct
  source 1..21: mol_type = other RNA
gctctgacgcttatcgacgcc

SEQ ID NO: 12043 - RNA, 21 nt, synthetic construct
  source 1..21: mol_type = other RNA
gctctgcaccctctgtggccc

SEQ ID NO: 12044 - RNA, 21 nt, synthetic construct
  source 1..21: mol_type = other RNA
gctctgcttcccttagactgg

SEQ ID NO: 12045 - RNA, 21 nt, synthetic construct
  source 1..21: mol_type = other RNA
gctctggagaatctcacgcag

SEQ ID NO: 12046 - RNA, 21 nt, synthetic construct
  source 1..21: mol_type = other RNA
gctctggtccttcctctcccg

SEQ ID NO: 12047 - RNA, 21 nt, synthetic construct
  source 1..21: mol_type = other RNA
gctctgttgcccacgctggag

SEQ ID NO: 12048 - RNA, 21 nt, synthetic construct
  source 1..21: mol_type = other RNA
gctctttcgcggggcctctgg

SEQ ID NO: 12049 - RNA, 21 nt, synthetic construct
  source 1..21: mol_type = other RNA
gctctttgcctggttgtttcc

SEQ ID NO: 12050 - RNA, 21 nt, synthetic construct
  source 1..21: mol_type = other RNA
gctgaggcgggaggatctctt

SEQ ID NO: 12051 - RNA, 21 nt, synthetic construct
  source 1..21: mol_type = other RNA
gctgaggtttgtgaacgcgtg

SEQ ID NO: 12052 - RNA, 21 nt, synthetic construct
  source 1..21: mol_type = other RNA
gctgccatttatcccctgtgt

SEQ ID NO: 12053 - RNA, 21 nt, synthetic construct
  source 1..21: mol_type = other RNA
gctgcgctgggggagccagag

SEQ ID NO: 12054 - RNA, 21 nt, synthetic construct
  source 1..21: mol_type = other RNA
gctgcggctctgcttccctta

SEQ ID NO: 12055 - RNA, 21 nt, synthetic construct
  source 1..21: mol_type = other RNA
gctgctccggtggctgaggcg

SEQ ID NO: 12056 - RNA, 21 nt, synthetic construct
  source 1..21: mol_type = other RNA
gctggagtgcactggcgccat

SEQ ID NO: 12057 - RNA, 21 nt, synthetic construct
  source 1..21: mol_type = other RNA
gctggagtgggggacgggtag

SEQ ID NO: 12058 - RNA, 21 nt, synthetic construct
  source 1..21: mol_type = other RNA
gctggatctcggggaagcggc

SEQ ID NO: 12059 - RNA, 21 nt, synthetic construct
  source 1..21: mol_type = other RNA
gctggtctcaactacggacct

SEQ ID NO: 12060 - RNA, 21 nt, synthetic construct
  source 1..21: mol_type = other RNA
gctgtaattcgtgcatttttt

SEQ ID NO: 12061 - RNA, 21 nt, synthetic construct
  source 1..21: mol_type = other RNA
gctgtgatacaaagcggtttc

SEQ ID NO: 12062 - RNA, 21 nt, synthetic construct
  source 1..21: mol_type = other RNA
gctgtgctctctcgctccgtg

SEQ ID NO: 12063 - RNA, 21 nt, synthetic construct
  source 1..21: mol_type = other RNA
gctgtggacttcgtctaggcg

SEQ ID NO: 12064 - RNA, 21 nt, synthetic construct
  source 1..21: mol_type = other RNA
gctgtttcctccccacggtgt

SEQ ID NO: 12065 - RNA, 21 nt, synthetic construct
  source 1..21: mol_type = other RNA
gcttacccgggcgacgcctcc

SEQ ID NO: 12066 - RNA, 21 nt, synthetic construct
  source 1..21: mol_type = other RNA
gcttaggcttttgagctatca

SEQ ID NO: 12067 - RNA, 21 nt, synthetic construct
  source 1..21: mol_type = other RNA
gcttatcgacgccctaaactt

SEQ ID NO: 12068 - RNA, 21 nt, synthetic construct
  source 1..21: mol_type = other RNA
gcttccccgagatccagccct

SEQ ID NO: 12069 - RNA, 21 nt, synthetic construct
  source 1..21: mol_type = other RNA
gcttcccttagactggagagc

SEQ ID NO: 12070 - RNA, 21 nt, synthetic construct
  source 1..21: mol_type = other RNA
gcttcctctttggctctttgc

SEQ ID NO: 12071 - RNA, 21 nt, synthetic construct
  source 1..21: mol_type = other RNA
gcttgacttcaatctcgattg

SEQ ID NO: 12072 - RNA, 21 nt, synthetic construct
  source 1..21: mol_type = other RNA
gcttgaggtccgtagttgaga

SEQ ID NO: 12073 - RNA, 21 nt, synthetic construct
  source 1..21: mol_type = other RNA
gcttggctgtgatacaaagcg

SEQ ID NO: 12074 - RNA, 21 nt, synthetic construct
  source 1..21: mol_type = other RNA
gcttggggtctgggggaggcg

SEQ ID NO: 12075 - RNA, 21 nt, synthetic construct
  source 1..21: mol_type = other RNA
gctttgcgtcatttaattttg

SEQ ID NO: 12076 - RNA, 21 nt, synthetic construct
  source 1..21: mol_type = other RNA
gctttgtatcacagccaagca

SEQ ID NO: 12077 - RNA, 21 nt, synthetic construct
  source 1..21: mol_type = other RNA
gcttttgagctatcatggcgc

SEQ ID NO: 12078 - RNA, 21 nt, synthetic construct
  source 1..21: mol_type = other RNA
gcttttgcgggagcgcatgcc

SEQ ID NO: 12079 - RNA, 21 nt, synthetic construct
  source 1..21: mol_type = other RNA
ggaaacaaccaggcaaagagc

SEQ ID NO: 12080 - RNA, 21 nt, synthetic construct
  source 1..21: mol_type = other RNA
ggaaacagcacgcgacgtttg

SEQ ID NO: 12081 - RNA, 21 nt, synthetic construct
  source 1..21: mol_type = other RNA
ggaagagaaaccctcccccaa

SEQ ID NO: 12082 - RNA, 21 nt, synthetic construct
  source 1..21: mol_type = other RNA
ggaagataactgttttcaaaa

SEQ ID NO: 12083 - RNA, 21 nt, synthetic construct
  source 1..21: mol_type = other RNA
ggaagcagagccgcagcagac

SEQ ID NO: 12084 - RNA, 21 nt, synthetic construct
  source 1..21: mol_type = other RNA
ggaagccctctgtacgaaaag

SEQ ID NO: 12085 - RNA, 21 nt, synthetic construct
  source 1..21: mol_type = other RNA
ggaaggaccagagcgggaggg

SEQ ID NO: 12086 - RNA, 21 nt, synthetic construct
  source 1..21: mol_type = other RNA
ggaagtcacggagcgagagag

SEQ ID NO: 12087 - RNA, 21 nt, synthetic construct
  source 1..21: mol_type = other RNA
ggacaaagtttagggcgtcga

SEQ ID NO: 12088 - RNA, 21 nt, synthetic construct
  source 1..21: mol_type = other RNA
ggacatgcgaacttagcgggc

SEQ ID NO: 12089 - RNA, 21 nt, synthetic construct
  source 1..21: mol_type = other RNA
ggaccacaggcacgagccacc

SEQ ID NO: 12090 - RNA, 21 nt, synthetic construct
  source 1..21: mol_type = other RNA
ggaccagagcgggagggtagg

SEQ ID NO: 12091 - RNA, 21 nt, synthetic construct
  source 1..21: mol_type = other RNA
ggacctcaagccatcctcccg

SEQ ID NO: 12092 - RNA, 21 nt, synthetic construct
  source 1..21: mol_type = other RNA
ggacgagcctacccgtccccc

SEQ ID NO: 12093 - RNA, 21 nt, synthetic construct
  source 1..21: mol_type = other RNA
ggacgcgcgctacttgcccct

SEQ ID NO: 12094 - RNA, 21 nt, synthetic construct
  source 1..21: mol_type = other RNA
ggacgggtaggctcgtcccaa

SEQ ID NO: 12095 - RNA, 21 nt, synthetic construct
  source 1..21: mol_type = other RNA
ggacttcgtctaggcgcccgc

SEQ ID NO: 12096 - RNA, 21 nt, synthetic construct
  source 1..21: mol_type = other RNA
ggactttatgtgctttgcgtc

SEQ ID NO: 12097 - RNA, 21 nt, synthetic construct
  source 1..21: mol_type = other RNA
ggagaacttggagaagggaag

SEQ ID NO: 12098 - RNA, 21 nt, synthetic construct
  source 1..21: mol_type = other RNA
ggagaagggaagtcacggagc

SEQ ID NO: 12099 - RNA, 21 nt, synthetic construct
  source 1..21: mol_type = other RNA
ggagaatctcacgcagaaggc

SEQ ID NO: 12100 - RNA, 21 nt, synthetic construct
  source 1..21: mol_type = other RNA
ggagacctttggcctacggcg

SEQ ID NO: 12101 - RNA, 21 nt, synthetic construct
  source 1..21: mol_type = other RNA
ggagagctgtggacttcgtct

SEQ ID NO: 12102 - RNA, 21 nt, synthetic construct
  source 1..21: mol_type = other RNA
ggagaggaaggaccagagcgg

SEQ ID NO: 12103 - RNA, 21 nt, synthetic construct
  source 1..21: mol_type = other RNA
ggagcagctgggaccacaggc

SEQ ID NO: 12104 - RNA, 21 nt, synthetic construct
  source 1..21: mol_type = other RNA
ggagcaggggagacctttggc

SEQ ID NO: 12105 - RNA, 21 nt, synthetic construct
  source 1..21: mol_type = other RNA
ggagccagaggccccgcgaaa

SEQ ID NO: 12106 - RNA, 21 nt, synthetic construct
  source 1..21: mol_type = other RNA
ggagcgagagagcacagcgag

SEQ ID NO: 12107 - RNA, 21 nt, synthetic construct
  source 1..21: mol_type = other RNA
ggagcgcatgccttttggctg

SEQ ID NO: 12108 - RNA, 21 nt, synthetic construct
  source 1..21: mol_type = other RNA
ggaggaaacagcacgcgacgt

SEQ ID NO: 12109 - RNA, 21 nt, synthetic construct
  source 1..21: mol_type = other RNA
ggaggatctcttgagcttagg

SEQ ID NO: 12110 - RNA, 21 nt, synthetic construct
  source 1..21: mol_type = other RNA
ggaggatggcttgaggtccgt

SEQ ID NO: 12111 - RNA, 21 nt, synthetic construct
  source 1..21: mol_type = other RNA
ggaggcgtcgcccgggtaagc

SEQ ID NO: 12112 - RNA, 21 nt, synthetic construct
  source 1..21: mol_type = other RNA
ggaggggcgcttggggtctgg

SEQ ID NO: 12113 - RNA, 21 nt, synthetic construct
  source 1..21: mol_type = other RNA
ggagggtcgggacaaagttta

SEQ ID NO: 12114 - RNA, 21 nt, synthetic construct
  source 1..21: mol_type = other RNA
ggagggtttctcttccgctct

SEQ ID NO: 12115 - RNA, 21 nt, synthetic construct
  source 1..21: mol_type = other RNA
ggagtgcactggcgccatgat

SEQ ID NO: 12116 - RNA, 21 nt, synthetic construct
  source 1..21: mol_type = other RNA
ggagtggggaagggggtgcgc

SEQ ID NO: 12117 - RNA, 21 nt, synthetic construct
  source 1..21: mol_type = other RNA
ggagtgggggacgggtaggct

SEQ ID NO: 12118 - RNA, 21 nt, synthetic construct
  source 1..21: mol_type = other RNA
ggataaatggcagcaatcgag

SEQ ID NO: 12119 - RNA, 21 nt, synthetic construct
  source 1..21: mol_type = other RNA
ggatctcggggaagcggcggg

SEQ ID NO: 12120 - RNA, 21 nt, synthetic construct
  source 1..21: mol_type = other RNA
ggatctcttgagcttaggctt

SEQ ID NO: 12121 - RNA, 21 nt, synthetic construct
  source 1..21: mol_type = other RNA
ggatggcttgaggtccgtagt

SEQ ID NO: 12122 - RNA, 21 nt, synthetic construct
  source 1..21: mol_type = other RNA
ggattacaggcgtaagctacc

SEQ ID NO: 12123 - RNA, 21 nt, synthetic construct
  source 1..21: mol_type = other RNA
ggcaaagagccaaagaggaag

SEQ ID NO: 12124 - RNA, 21 nt, synthetic construct
  source 1..21: mol_type = other RNA
ggcaagtagcgcgcgtcccgg

SEQ ID NO: 12125 - RNA, 21 nt, synthetic construct
  source 1..21: mol_type = other RNA
ggcacacagaaagatgtcaat

SEQ ID NO: 12126 - RNA, 21 nt, synthetic construct
  source 1..21: mol_type = other RNA
ggcacagtacatcttggaaac

SEQ ID NO: 12127 - RNA, 21 nt, synthetic construct
  source 1..21: mol_type = other RNA
ggcaccgagattttaagaaac

SEQ ID NO: 12128 - RNA, 21 nt, synthetic construct
  source 1..21: mol_type = other RNA
ggcagaagataaccatagtag

SEQ ID NO: 12129 - RNA, 21 nt, synthetic construct
  source 1..21: mol_type = other RNA
ggcagcaatcgagattgaagt

SEQ ID NO: 12130 - RNA, 21 nt, synthetic construct
  source 1..21: mol_type = other RNA
ggcaggcgtttttcttaaaaa

SEQ ID NO: 12131 - RNA, 21 nt, synthetic construct
  source 1..21: mol_type = other RNA
ggcatgcgctcccgcaaaagc

SEQ ID NO: 12132 - RNA, 21 nt, synthetic construct
  source 1..21: mol_type = other RNA
ggcatgggccctgtggtcttt

SEQ ID NO: 12133 - RNA, 21 nt, synthetic construct
  source 1..21: mol_type = other RNA
ggccaaaggtctcccctgctc

SEQ ID NO: 12134 - RNA, 21 nt, synthetic construct
  source 1..21: mol_type = other RNA
ggccaacatggtgaagcctgg

SEQ ID NO: 12135 - RNA, 21 nt, synthetic construct
  source 1..21: mol_type = other RNA
ggccacaccgtggggaggaaa

SEQ ID NO: 12136 - RNA, 21 nt, synthetic construct
  source 1..21: mol_type = other RNA
ggccacagagggtgcagagcg

SEQ ID NO: 12137 - RNA, 21 nt, synthetic construct
  source 1..21: mol_type = other RNA
ggccaccaaggagaacttgga

SEQ ID NO: 12138 - RNA, 21 nt, synthetic construct
  source 1..21: mol_type = other RNA
ggccaggctggtctcaactac

SEQ ID NO: 12139 - RNA, 21 nt, synthetic construct
  source 1..21: mol_type = other RNA
ggcccatgccgcccagtttgc

SEQ ID NO: 12140 - RNA, 21 nt, synthetic construct
  source 1..21: mol_type = other RNA
ggccccacatagacccagagg

SEQ ID NO: 12141 - RNA, 21 nt, synthetic construct
  source 1..21: mol_type = other RNA
ggccccgcgaaagagcggaag

SEQ ID NO: 12142 - RNA, 21 nt, synthetic construct
  source 1..21: mol_type = other RNA
ggccctcgctgtgctctctcg

SEQ ID NO: 12143 - RNA, 21 nt, synthetic construct
  source 1..21: mol_type = other RNA
ggccctgtggtcttttcgtac

SEQ ID NO: 12144 - RNA, 21 nt, synthetic construct
  source 1..21: mol_type = other RNA
ggccgaggcgggaggatggct

SEQ ID NO: 12145 - RNA, 21 nt, synthetic construct
  source 1..21: mol_type = other RNA
ggcctacggcgacgggagggt

SEQ ID NO: 12146 - RNA, 21 nt, synthetic construct
  source 1..21: mol_type = other RNA
ggcctgggagtggggaagggg

SEQ ID NO: 12147 - RNA, 21 nt, synthetic construct
  source 1..21: mol_type = other RNA
ggcgacgggagggtcgggaca

SEQ ID NO: 12148 - RNA, 21 nt, synthetic construct
  source 1..21: mol_type = other RNA
ggcgccagtgcactccagcgt

SEQ ID NO: 12149 - RNA, 21 nt, synthetic construct
  source 1..21: mol_type = other RNA
ggcgccatgatagctcaaaag

SEQ ID NO: 12150 - RNA, 21 nt, synthetic construct
  source 1..21: mol_type = other RNA
ggcgcccgctaagttcgcatg

SEQ ID NO: 12151 - RNA, 21 nt, synthetic construct
  source 1..21: mol_type = other RNA
ggcgcctagacgaagtccaca

SEQ ID NO: 12152 - RNA, 21 nt, synthetic construct
  source 1..21: mol_type = other RNA
ggcgcggcgctgaggtttgtg

SEQ ID NO: 12153 - RNA, 21 nt, synthetic construct
  source 1..21: mol_type = other RNA
ggcgctctgacgcttatcgac

SEQ ID NO: 12154 - RNA, 21 nt, synthetic construct
  source 1..21: mol_type = other RNA
ggcgctgaggtttgtgaacgc

SEQ ID NO: 12155 - RNA, 21 nt, synthetic construct
  source 1..21: mol_type = other RNA
ggcgcttggggtctgggggag

SEQ ID NO: 12156 - RNA, 21 nt, synthetic construct
  source 1..21: mol_type = other RNA
ggcggaagataactgttttca

SEQ ID NO: 12157 - RNA, 21 nt, synthetic construct
  source 1..21: mol_type = other RNA
ggcggcatgggccctgtggtc

SEQ ID NO: 12158 - RNA, 21 nt, synthetic construct
  source 1..21: mol_type = other RNA
ggcgggaggatctcttgagct

SEQ ID NO: 12159 - RNA, 21 nt, synthetic construct
  source 1..21: mol_type = other RNA
ggcgggaggatggcttgaggt

SEQ ID NO: 12160 - RNA, 21 nt, synthetic construct
  source 1..21: mol_type = other RNA
ggcgggccaccaaggagaact

SEQ ID NO: 12161 - RNA, 21 nt, synthetic construct
  source 1..21: mol_type = other RNA
ggcggggagcaggggagacct

SEQ ID NO: 12162 - RNA, 21 nt, synthetic construct
  source 1..21: mol_type = other RNA
ggcgtaagctaccacgcccaa

SEQ ID NO: 12163 - RNA, 21 nt, synthetic construct
  source 1..21: mol_type = other RNA
ggcgtcgataagcgtcagagc

SEQ ID NO: 12164 - RNA, 21 nt, synthetic construct
  source 1..21: mol_type = other RNA
ggcgtcgcccgggtaagcctg

SEQ ID NO: 12165 - RNA, 21 nt, synthetic construct
  source 1..21: mol_type = other RNA
ggctagtccagggctggatct

SEQ ID NO: 12166 - RNA, 21 nt, synthetic construct
  source 1..21: mol_type = other RNA
ggctcccccagcgcagctgga

SEQ ID NO: 12167 - RNA, 21 nt, synthetic construct
  source 1..21: mol_type = other RNA
ggctcgtcccaaaggcgcggc

SEQ ID NO: 12168 - RNA, 21 nt, synthetic construct
  source 1..21: mol_type = other RNA
ggctcgtgcctgtggtcccag

SEQ ID NO: 12169 - RNA, 21 nt, synthetic construct
  source 1..21: mol_type = other RNA
ggctctgcttcccttagactg

SEQ ID NO: 12170 - RNA, 21 nt, synthetic construct
  source 1..21: mol_type = other RNA
ggctctttgcctggttgtttc

SEQ ID NO: 12171 - RNA, 21 nt, synthetic construct
  source 1..21: mol_type = other RNA
ggctggatctcggggaagcgg

SEQ ID NO: 12172 - RNA, 21 nt, synthetic construct
  source 1..21: mol_type = other RNA
ggctggtctcaactacggacc

SEQ ID NO: 12173 - RNA, 21 nt, synthetic construct
  source 1..21: mol_type = other RNA
ggctgtaattcgtgcattttt

SEQ ID NO: 12174 - RNA, 21 nt, synthetic construct
  source 1..21: mol_type = other RNA
ggctgtgatacaaagcggttt

SEQ ID NO: 12175 - RNA, 21 nt, synthetic construct
  source 1..21: mol_type = other RNA
ggcttacccgggcgacgcctc

SEQ ID NO: 12176 - RNA, 21 nt, synthetic construct
  source 1..21: mol_type = other RNA
ggcttcctctttggctctttg

SEQ ID NO: 12177 - RNA, 21 nt, synthetic construct
  source 1..21: mol_type = other RNA
ggcttgacttcaatctcgatt

SEQ ID NO: 12178 - RNA, 21 nt, synthetic construct
  source 1..21: mol_type = other RNA
ggcttgaggtccgtagttgag

SEQ ID NO: 12179 - RNA, 21 nt, synthetic construct
  source 1..21: mol_type = other RNA
ggcttttgagctatcatggcg

SEQ ID NO: 12180 - RNA, 21 nt, synthetic construct
  source 1..21: mol_type = other RNA
ggcttttgcgggagcgcatgc

SEQ ID NO: 12181 - RNA, 21 nt, synthetic construct
  source 1..21: mol_type = other RNA
gggaagcagagccgcagcaga

SEQ ID NO: 12182 - RNA, 21 nt, synthetic construct
  source 1..21: mol_type = other RNA
gggaagtcacggagcgagaga

SEQ ID NO: 12183 - RNA, 21 nt, synthetic construct
  source 1..21: mol_type = other RNA
gggacaaagtttagggcgtcg

SEQ ID NO: 12184 - RNA, 21 nt, synthetic construct
  source 1..21: mol_type = other RNA
gggaccacaggcacgagccac

SEQ ID NO: 12185 - RNA, 21 nt, synthetic construct
  source 1..21: mol_type = other RNA
gggacgagcctacccgtcccc

SEQ ID NO: 12186 - RNA, 21 nt, synthetic construct
  source 1..21: mol_type = other RNA
gggacgcgcgctacttgcccc

SEQ ID NO: 12187 - RNA, 21 nt, synthetic construct
  source 1..21: mol_type = other RNA
gggacgggtaggctcgtccca

SEQ ID NO: 12188 - RNA, 21 nt, synthetic construct
  source 1..21: mol_type = other RNA
gggagacctttggcctacggc

SEQ ID NO: 12189 - RNA, 21 nt, synthetic construct
  source 1..21: mol_type = other RNA
gggagaggaaggaccagagcg

SEQ ID NO: 12190 - RNA, 21 nt, synthetic construct
  source 1..21: mol_type = other RNA
gggagcaggggagacctttgg

SEQ ID NO: 12191 - RNA, 21 nt, synthetic construct
  source 1..21: mol_type = other RNA
gggagccagaggccccgcgaa

SEQ ID NO: 12192 - RNA, 21 nt, synthetic construct
  source 1..21: mol_type = other RNA
gggagcgcatgccttttggct

SEQ ID NO: 12193 - RNA, 21 nt, synthetic construct
  source 1..21: mol_type = other RNA
gggaggaaacagcacgcgacg

SEQ ID NO: 12194 - RNA, 21 nt, synthetic construct
  source 1..21: mol_type = other RNA
gggaggatctcttgagcttag

SEQ ID NO: 12195 - RNA, 21 nt, synthetic construct
  source 1..21: mol_type = other RNA
gggaggatggcttgaggtccg

SEQ ID NO: 12196 - RNA, 21 nt, synthetic construct
  source 1..21: mol_type = other RNA
gggaggcgtcgcccgggtaag

SEQ ID NO: 12197 - RNA, 21 nt, synthetic construct
  source 1..21: mol_type = other RNA
gggagggtcgggacaaagttt

SEQ ID NO: 12198 - RNA, 21 nt, synthetic construct
  source 1..21: mol_type = other RNA
gggagggtttctcttccgctc

SEQ ID NO: 12199 - RNA, 21 nt, synthetic construct
  source 1..21: mol_type = other RNA
gggagtggggaagggggtgcg

SEQ ID NO: 12200 - RNA, 21 nt, synthetic construct
  source 1..21: mol_type = other RNA
gggataaatggcagcaatcga

SEQ ID NO: 12201 - RNA, 21 nt, synthetic construct
  source 1..21: mol_type = other RNA
gggcaagtagcgcgcgtcccg

SEQ ID NO: 12202 - RNA, 21 nt, synthetic construct
  source 1..21: mol_type = other RNA
gggccacaccgtggggaggaa

SEQ ID NO: 12203 - RNA, 21 nt, synthetic construct
  source 1..21: mol_type = other RNA
gggccacagagggtgcagagc

SEQ ID NO: 12204 - RNA, 21 nt, synthetic construct
  source 1..21: mol_type = other RNA
gggccaccaaggagaacttgg

SEQ ID NO: 12205 - RNA, 21 nt, synthetic construct
  source 1..21: mol_type = other RNA
gggcccatgccgcccagtttg

SEQ ID NO: 12206 - RNA, 21 nt, synthetic construct
  source 1..21: mol_type = other RNA
gggccctgtggtcttttcgta

SEQ ID NO: 12207 - RNA, 21 nt, synthetic construct
  source 1..21: mol_type = other RNA
gggcgcctagacgaagtccac

SEQ ID NO: 12208 - RNA, 21 nt, synthetic construct
  source 1..21: mol_type = other RNA
gggcgcttggggtctggggga

SEQ ID NO: 12209 - RNA, 21 nt, synthetic construct
  source 1..21: mol_type = other RNA
gggcggcatgggccctgtggt

SEQ ID NO: 12210 - RNA, 21 nt, synthetic construct
  source 1..21: mol_type = other RNA
gggcgtcgataagcgtcagag

SEQ ID NO: 12211 - RNA, 21 nt, synthetic construct
  source 1..21: mol_type = other RNA
gggctagtccagggctggatc

SEQ ID NO: 12212 - RNA, 21 nt, synthetic construct
  source 1..21: mol_type = other RNA
gggctggatctcggggaagcg

SEQ ID NO: 12213 - RNA, 21 nt, synthetic construct
  source 1..21: mol_type = other RNA
gggcttcctctttggctcttt

SEQ ID NO: 12214 - RNA, 21 nt, synthetic construct
  source 1..21: mol_type = other RNA
gggcttttgcgggagcgcatg

SEQ ID NO: 12215 - RNA, 21 nt, synthetic construct
  source 1..21: mol_type = other RNA
ggggacgggtaggctcgtccc

SEQ ID NO: 12216 - RNA, 21 nt, synthetic construct
  source 1..21: mol_type = other RNA
ggggagacctttggcctacgg

SEQ ID NO: 12217 - RNA, 21 nt, synthetic construct
  source 1..21: mol_type = other RNA
ggggagcaggggagacctttg

SEQ ID NO: 12218 - RNA, 21 nt, synthetic construct
  source 1..21: mol_type = other RNA
ggggaggaaacagcacgcgac

SEQ ID NO: 12219 - RNA, 21 nt, synthetic construct
  source 1..21: mol_type = other RNA
ggggaggcgtcgcccgggtaa

SEQ ID NO: 12220 - RNA, 21 nt, synthetic construct
  source 1..21: mol_type = other RNA
ggggagggtttctcttccgct

SEQ ID NO: 12221 - RNA, 21 nt, synthetic construct
  source 1..21: mol_type = other RNA
ggggataaatggcagcaatcg

SEQ ID NO: 12222 - RNA, 21 nt, synthetic construct
  source 1..21: mol_type = other RNA
ggggcaagtagcgcgcgtccc

SEQ ID NO: 12223 - RNA, 21 nt, synthetic construct
  source 1..21: mol_type = other RNA
ggggccacaccgtggggagga

SEQ ID NO: 12224 - RNA, 21 nt, synthetic construct
  source 1..21: mol_type = other RNA
ggggctagtccagggctggat

SEQ ID NO: 12225 - RNA, 21 nt, synthetic construct
  source 1..21: mol_type = other RNA
gggggacgggtaggctcgtcc

SEQ ID NO: 12226 - RNA, 21 nt, synthetic construct
  source 1..21: mol_type = other RNA
gggggagggtttctcttccgc

SEQ ID NO: 12227 - RNA, 21 nt, synthetic construct
  source 1..21: mol_type = other RNA
gggggttgggcgtggtagctt

SEQ ID NO: 12228 - RNA, 21 nt, synthetic construct
  source 1..21: mol_type = other RNA
ggggtggcctgggagtgggga

SEQ ID NO: 12229 - RNA, 21 nt, synthetic construct
  source 1..21: mol_type = other RNA
ggggttgggcgtggtagctta

SEQ ID NO: 12230 - RNA, 21 nt, synthetic construct
  source 1..21: mol_type = other RNA
gggtaagcctgtctgctgcgg

SEQ ID NO: 12231 - RNA, 21 nt, synthetic construct
  source 1..21: mol_type = other RNA
gggtaggctcgtcccaaaggc

SEQ ID NO: 12232 - RNA, 21 nt, synthetic construct
  source 1..21: mol_type = other RNA
gggtcgggacaaagtttaggg

SEQ ID NO: 12233 - RNA, 21 nt, synthetic construct
  source 1..21: mol_type = other RNA
gggtctatgtggggccacacc

SEQ ID NO: 12234 - RNA, 21 nt, synthetic construct
  source 1..21: mol_type = other RNA
gggtgcagagcgggagaggaa

SEQ ID NO: 12235 - RNA, 21 nt, synthetic construct
  source 1..21: mol_type = other RNA
gggtgcgcacccccttcccca

SEQ ID NO: 12236 - RNA, 21 nt, synthetic construct
  source 1..21: mol_type = other RNA
gggtggcctgggagtggggaa

SEQ ID NO: 12237 - RNA, 21 nt, synthetic construct
  source 1..21: mol_type = other RNA
gggttgggcgtggtagcttac

SEQ ID NO: 12238 - RNA, 21 nt, synthetic construct
  source 1..21: mol_type = other RNA
gggtttctcttccgctctttc

SEQ ID NO: 12239 - RNA, 21 nt, synthetic construct
  source 1..21: mol_type = other RNA
ggtaagcctgtctgctgcggc

SEQ ID NO: 12240 - RNA, 21 nt, synthetic construct
  source 1..21: mol_type = other RNA
ggtaggctcgtcccaaaggcg

SEQ ID NO: 12241 - RNA, 21 nt, synthetic construct
  source 1..21: mol_type = other RNA
ggtcccagctgctccggtggc

SEQ ID NO: 12242 - RNA, 21 nt, synthetic construct
  source 1..21: mol_type = other RNA
ggtccgtagttgagaccagcc

SEQ ID NO: 12243 - RNA, 21 nt, synthetic construct
  source 1..21: mol_type = other RNA
ggtccttcctctcccgctctg

SEQ ID NO: 12244 - RNA, 21 nt, synthetic construct
  source 1..21: mol_type = other RNA
ggtcgggacaaagtttagggc

SEQ ID NO: 12245 - RNA, 21 nt, synthetic construct
  source 1..21: mol_type = other RNA
ggtctatgtggggccacaccg

SEQ ID NO: 12246 - RNA, 21 nt, synthetic construct
  source 1..21: mol_type = other RNA
ggtctcaactacggacctcaa

SEQ ID NO: 12247 - RNA, 21 nt, synthetic construct
  source 1..21: mol_type = other RNA
ggtcttttcgtacagagggct

SEQ ID NO: 12248 - RNA, 21 nt, synthetic construct
  source 1..21: mol_type = other RNA
ggtgaagcctggtctctacaa

SEQ ID NO: 12249 - RNA, 21 nt, synthetic construct
  source 1..21: mol_type = other RNA
ggtgcagagcgggagaggaag

SEQ ID NO: 12250 - RNA, 21 nt, synthetic construct
  source 1..21: mol_type = other RNA
ggtgccttagtttcttcatct

SEQ ID NO: 12251 - RNA, 21 nt, synthetic construct
  source 1..21: mol_type = other RNA
ggtgcgcacccccttccccac

SEQ ID NO: 12252 - RNA, 21 nt, synthetic construct
  source 1..21: mol_type = other RNA
ggtgctaggacatgcgaactt

SEQ ID NO: 12253 - RNA, 21 nt, synthetic construct
  source 1..21: mol_type = other RNA
ggtggcctgggagtggggaag

SEQ ID NO: 12254 - RNA, 21 nt, synthetic construct
  source 1..21: mol_type = other RNA
ggtggctcgtgcctgtggtcc

SEQ ID NO: 12255 - RNA, 21 nt, synthetic construct
  source 1..21: mol_type = other RNA
ggtgtggccccacatagaccc

SEQ ID NO: 12256 - RNA, 21 nt, synthetic construct
  source 1..21: mol_type = other RNA
ggttaggcttgacttcaatct

SEQ ID NO: 12257 - RNA, 21 nt, synthetic construct
  source 1..21: mol_type = other RNA
ggttatcttctgcctctcaca

SEQ ID NO: 12258 - RNA, 21 nt, synthetic construct
  source 1..21: mol_type = other RNA
ggttgggcgtggtagcttacg

SEQ ID NO: 12259 - RNA, 21 nt, synthetic construct
  source 1..21: mol_type = other RNA
ggttgggggagggtttctctt

SEQ ID NO: 12260 - RNA, 21 nt, synthetic construct
  source 1..21: mol_type = other RNA
ggttgtttccaagatgtactg

SEQ ID NO: 12261 - RNA, 21 nt, synthetic construct
  source 1..21: mol_type = other RNA
ggtttctcttccgctctttcg

SEQ ID NO: 12262 - RNA, 21 nt, synthetic construct
  source 1..21: mol_type = other RNA
ggtttgtgaacgcgtggaggg

SEQ ID NO: 12263 - RNA, 21 nt, synthetic construct
  source 1..21: mol_type = other RNA
ggttttgaaaacatgaggggg

SEQ ID NO: 12264 - RNA, 21 nt, synthetic construct
  source 1..21: mol_type = other RNA
gtaagaggcacagtacatctt

SEQ ID NO: 12265 - RNA, 21 nt, synthetic construct
  source 1..21: mol_type = other RNA
gtaagcctgtctgctgcggct

SEQ ID NO: 12266 - RNA, 21 nt, synthetic construct
  source 1..21: mol_type = other RNA
gtaagctaccacgcccaaccc

SEQ ID NO: 12267 - RNA, 21 nt, synthetic construct
  source 1..21: mol_type = other RNA
gtacagagggcttcctctttg

SEQ ID NO: 12268 - RNA, 21 nt, synthetic construct
  source 1..21: mol_type = other RNA
gtacatcttggaaacaaccag

SEQ ID NO: 12269 - RNA, 21 nt, synthetic construct
  source 1..21: mol_type = other RNA
gtacgaaaagaccacagggcc

SEQ ID NO: 12270 - RNA, 21 nt, synthetic construct
  source 1..21: mol_type = other RNA
gtactgtgcctcttactttcg

SEQ ID NO: 12271 - RNA, 21 nt, synthetic construct
  source 1..21: mol_type = other RNA
gtagaatgcttggctgtgata

SEQ ID NO: 12272 - RNA, 21 nt, synthetic construct
  source 1..21: mol_type = other RNA
gtaggccaaaggtctcccctg

SEQ ID NO: 12273 - RNA, 21 nt, synthetic construct
  source 1..21: mol_type = other RNA
gtaggctcgtcccaaaggcgc

SEQ ID NO: 12274 - RNA, 21 nt, synthetic construct
  source 1..21: mol_type = other RNA
gtagttatctatggcggaaga

SEQ ID NO: 12275 - RNA, 21 nt, synthetic construct
  source 1..21: mol_type = other RNA
gtatcacagccaagcattcta

SEQ ID NO: 12276 - RNA, 21 nt, synthetic construct
  source 1..21: mol_type = other RNA
gtcaagcctaaccagggcttt

SEQ ID NO: 12277 - RNA, 21 nt, synthetic construct
  source 1..21: mol_type = other RNA
gtcaataacgggtagttctta

SEQ ID NO: 12278 - RNA, 21 nt, synthetic construct
  source 1..21: mol_type = other RNA
gtcacggagcgagagagcaca

SEQ ID NO: 12279 - RNA, 21 nt, synthetic construct
  source 1..21: mol_type = other RNA
gtcagagcgccgaggttgggg

SEQ ID NO: 12280 - RNA, 21 nt, synthetic construct
  source 1..21: mol_type = other RNA
gtccacagctctccagtctaa

SEQ ID NO: 12281 - RNA, 21 nt, synthetic construct
  source 1..21: mol_type = other RNA
gtccagggctggatctcgggg

SEQ ID NO: 12282 - RNA, 21 nt, synthetic construct
  source 1..21: mol_type = other RNA
gtcccaaaggcgcggcgctga

SEQ ID NO: 12283 - RNA, 21 nt, synthetic construct
  source 1..21: mol_type = other RNA
gtcccagctgctccggtggct

SEQ ID NO: 12284 - RNA, 21 nt, synthetic construct
  source 1..21: mol_type = other RNA
gtcccccactccagctgcgct

SEQ ID NO: 12285 - RNA, 21 nt, synthetic construct
  source 1..21: mol_type = other RNA
gtcccgggtgcgcaccccctt

SEQ ID NO: 12286 - RNA, 21 nt, synthetic construct
  source 1..21: mol_type = other RNA
gtccgtagttgagaccagcct

SEQ ID NO: 12287 - RNA, 21 nt, synthetic construct
  source 1..21: mol_type = other RNA
gtcctagcacctctgggtcta

SEQ ID NO: 12288 - RNA, 21 nt, synthetic construct
  source 1..21: mol_type = other RNA
gtccttcctctcccgctctgc

SEQ ID NO: 12289 - RNA, 21 nt, synthetic construct
  source 1..21: mol_type = other RNA
gtccttggcacacagaaagat

SEQ ID NO: 12290 - RNA, 21 nt, synthetic construct
  source 1..21: mol_type = other RNA
gtcgataagcgtcagagcgcc

SEQ ID NO: 12291 - RNA, 21 nt, synthetic construct
  source 1..21: mol_type = other RNA
gtcgcccgggtaagcctgtct

SEQ ID NO: 12292 - RNA, 21 nt, synthetic construct
  source 1..21: mol_type = other RNA
gtcgccgtaggccaaaggtct

SEQ ID NO: 12293 - RNA, 21 nt, synthetic construct
  source 1..21: mol_type = other RNA
gtcgcgtgctgtttcctcccc

SEQ ID NO: 12294 - RNA, 21 nt, synthetic construct
  source 1..21: mol_type = other RNA
gtcgggacaaagtttagggcg

SEQ ID NO: 12295 - RNA, 21 nt, synthetic construct
  source 1..21: mol_type = other RNA
gtctaagggaagcagagccgc

SEQ ID NO: 12296 - RNA, 21 nt, synthetic construct
  source 1..21: mol_type = other RNA
gtctaggcgcccgctaagttc

SEQ ID NO: 12297 - RNA, 21 nt, synthetic construct
  source 1..21: mol_type = other RNA
gtctatgtggggccacaccgt

SEQ ID NO: 12298 - RNA, 21 nt, synthetic construct
  source 1..21: mol_type = other RNA
gtctcaactacggacctcaag

SEQ ID NO: 12299 - RNA, 21 nt, synthetic construct
  source 1..21: mol_type = other RNA
gtctcccctgctccccgccga

SEQ ID NO: 12300 - RNA, 21 nt, synthetic construct
  source 1..21: mol_type = other RNA
gtctctcctaccctcccgctc

SEQ ID NO: 12301 - RNA, 21 nt, synthetic construct
  source 1..21: mol_type = other RNA
gtctgctgcggctctgcttcc

SEQ ID NO: 12302 - RNA, 21 nt, synthetic construct
  source 1..21: mol_type = other RNA
gtcttttcgtacagagggctt

SEQ ID NO: 12303 - RNA, 21 nt, synthetic construct
  source 1..21: mol_type = other RNA
gtgaacgcgtggaggggcgct

SEQ ID NO: 12304 - RNA, 21 nt, synthetic construct
  source 1..21: mol_type = other RNA
gtgaagcctggtctctacaaa

SEQ ID NO: 12305 - RNA, 21 nt, synthetic construct
  source 1..21: mol_type = other RNA
gtgacatgtgatgggaacaaa

SEQ ID NO: 12306 - RNA, 21 nt, synthetic construct
  source 1..21: mol_type = other RNA
gtgacttcccttctccaagtt

SEQ ID NO: 12307 - RNA, 21 nt, synthetic construct
  source 1..21: mol_type = other RNA
gtgagaggcagaagataacca

SEQ ID NO: 12308 - RNA, 21 nt, synthetic construct
  source 1..21: mol_type = other RNA
gtgagattctccagagcaaac

SEQ ID NO: 12309 - RNA, 21 nt, synthetic construct
  source 1..21: mol_type = other RNA
gtgagtctctcctaccctccc

SEQ ID NO: 12310 - RNA, 21 nt, synthetic construct
  source 1..21: mol_type = other RNA
gtgatacaaagcggtttcgaa

SEQ ID NO: 12311 - RNA, 21 nt, synthetic construct
  source 1..21: mol_type = other RNA
gtgatgggaacaaataagtta

SEQ ID NO: 12312 - RNA, 21 nt, synthetic construct
  source 1..21: mol_type = other RNA
gtgcactccagcgtgggcaac

SEQ ID NO: 12313 - RNA, 21 nt, synthetic construct
  source 1..21: mol_type = other RNA
gtgcactggcgccatgatagc

SEQ ID NO: 12314 - RNA, 21 nt, synthetic construct
  source 1..21: mol_type = other RNA
gtgcagagcgggagaggaagg

SEQ ID NO: 12315 - RNA, 21 nt, synthetic construct
  source 1..21: mol_type = other RNA
gtgccaaggactttatgtgct

SEQ ID NO: 12316 - RNA, 21 nt, synthetic construct
  source 1..21: mol_type = other RNA
gtgcctcttactttcggtttt

SEQ ID NO: 12317 - RNA, 21 nt, synthetic construct
  source 1..21: mol_type = other RNA
gtgcctgtggtcccagctgct

SEQ ID NO: 12318 - RNA, 21 nt, synthetic construct
  source 1..21: mol_type = other RNA
gtgccttagtttcttcatctg

SEQ ID NO: 12319 - RNA, 21 nt, synthetic construct
  source 1..21: mol_type = other RNA
gtgcgcacccccttccccact

SEQ ID NO: 12320 - RNA, 21 nt, synthetic construct
  source 1..21: mol_type = other RNA
gtgctaggacatgcgaactta

SEQ ID NO: 12321 - RNA, 21 nt, synthetic construct
  source 1..21: mol_type = other RNA
gtgctctctcgctccgtgact

SEQ ID NO: 12322 - RNA, 21 nt, synthetic construct
  source 1..21: mol_type = other RNA
gtgctgtttcctccccacggt

SEQ ID NO: 12323 - RNA, 21 nt, synthetic construct
  source 1..21: mol_type = other RNA
gtgctttgcgtcatttaattt

SEQ ID NO: 12324 - RNA, 21 nt, synthetic construct
  source 1..21: mol_type = other RNA
gtggacttcgtctaggcgccc

SEQ ID NO: 12325 - RNA, 21 nt, synthetic construct
  source 1..21: mol_type = other RNA
gtggaggggcgcttggggtct

SEQ ID NO: 12326 - RNA, 21 nt, synthetic construct
  source 1..21: mol_type = other RNA
gtggccccacatagacccaga

SEQ ID NO: 12327 - RNA, 21 nt, synthetic construct
  source 1..21: mol_type = other RNA
gtggcccgccgtggggctagt

SEQ ID NO: 12328 - RNA, 21 nt, synthetic construct
  source 1..21: mol_type = other RNA
gtggccctcgctgtgctctct

SEQ ID NO: 12329 - RNA, 21 nt, synthetic construct
  source 1..21: mol_type = other RNA
gtggcctgggagtggggaagg

SEQ ID NO: 12330 - RNA, 21 nt, synthetic construct
  source 1..21: mol_type = other RNA
gtggctcgtgcctgtggtccc

SEQ ID NO: 12331 - RNA, 21 nt, synthetic construct
  source 1..21: mol_type = other RNA
gtgggcaacagagcgagaccc

SEQ ID NO: 12332 - RNA, 21 nt, synthetic construct
  source 1..21: mol_type = other RNA
gtggggaagggggtgcgcacc

SEQ ID NO: 12333 - RNA, 21 nt, synthetic construct
  source 1..21: mol_type = other RNA
gtggggaggaaacagcacgcg

SEQ ID NO: 12334 - RNA, 21 nt, synthetic construct
  source 1..21: mol_type = other RNA
gtggggccacaccgtggggag

SEQ ID NO: 12335 - RNA, 21 nt, synthetic construct
  source 1..21: mol_type = other RNA
gtggggctagtccagggctgg

SEQ ID NO: 12336 - RNA, 21 nt, synthetic construct
  source 1..21: mol_type = other RNA
gtgggggacgggtaggctcgt

SEQ ID NO: 12337 - RNA, 21 nt, synthetic construct
  source 1..21: mol_type = other RNA
gtggtcccagctgctccggtg

SEQ ID NO: 12338 - RNA, 21 nt, synthetic construct
  source 1..21: mol_type = other RNA
gtggtcttttcgtacagaggg

SEQ ID NO: 12339 - RNA, 21 nt, synthetic construct
  source 1..21: mol_type = other RNA
gtggtggctcgtgcctgtggt

SEQ ID NO: 12340 - RNA, 21 nt, synthetic construct
  source 1..21: mol_type = other RNA
gtgtgccaaggactttatgtg

SEQ ID NO: 12341 - RNA, 21 nt, synthetic construct
  source 1..21: mol_type = other RNA
gtgtggccccacatagaccca

SEQ ID NO: 12342 - RNA, 21 nt, synthetic construct
  source 1..21: mol_type = other RNA
gttaattattcgaaaccgctt

SEQ ID NO: 12343 - RNA, 21 nt, synthetic construct
  source 1..21: mol_type = other RNA
gttaggcttgacttcaatctc

SEQ ID NO: 12344 - RNA, 21 nt, synthetic construct
  source 1..21: mol_type = other RNA
gttatctatggcggaagataa

SEQ ID NO: 12345 - RNA, 21 nt, synthetic construct
  source 1..21: mol_type = other RNA
gttatcttccgccatagataa

SEQ ID NO: 12346 - RNA, 21 nt, synthetic construct
  source 1..21: mol_type = other RNA
gttatcttctgcctctcacag

SEQ ID NO: 12347 - RNA, 21 nt, synthetic construct
  source 1..21: mol_type = other RNA
gttattgacatctttctgtgt

SEQ ID NO: 12348 - RNA, 21 nt, synthetic construct
  source 1..21: mol_type = other RNA
gttcacaaacctcagcgccgc

SEQ ID NO: 12349 - RNA, 21 nt, synthetic construct
  source 1..21: mol_type = other RNA
gttcccatcacatgtcacttt

SEQ ID NO: 12350 - RNA, 21 nt, synthetic construct
  source 1..21: mol_type = other RNA
gttcgcatgtcctagcacctc

SEQ ID NO: 12351 - RNA, 21 nt, synthetic construct
  source 1..21: mol_type = other RNA
gttctccttggtggcccgccg

SEQ ID NO: 12352 - RNA, 21 nt, synthetic construct
  source 1..21: mol_type = other RNA
gttgcccacgctggagtgcac

SEQ ID NO: 12353 - RNA, 21 nt, synthetic construct
  source 1..21: mol_type = other RNA
gttggccaggctggtctcaac

SEQ ID NO: 12354 - RNA, 21 nt, synthetic construct
  source 1..21: mol_type = other RNA
gttgggcgtggtagcttacgc

SEQ ID NO: 12355 - RNA, 21 nt, synthetic construct
  source 1..21: mol_type = other RNA
gttgggggagggtttctcttc

SEQ ID NO: 12356 - RNA, 21 nt, synthetic construct
  source 1..21: mol_type = other RNA
gttgtttccaagatgtactgt

SEQ ID NO: 12357 - RNA, 21 nt, synthetic construct
  source 1..21: mol_type = other RNA
gtttagggcgtcgataagcgt

SEQ ID NO: 12358 - RNA, 21 nt, synthetic construct
  source 1..21: mol_type = other RNA
gtttccaagatgtactgtgcc

SEQ ID NO: 12359 - RNA, 21 nt, synthetic construct
  source 1..21: mol_type = other RNA
gtttcctccccacggtgtggc

SEQ ID NO: 12360 - RNA, 21 nt, synthetic construct
  source 1..21: mol_type = other RNA
gtttctcttccgctctttcgc

SEQ ID NO: 12361 - RNA, 21 nt, synthetic construct
  source 1..21: mol_type = other RNA
gtttcttaaaatctcggtgcc

SEQ ID NO: 12362 - RNA, 21 nt, synthetic construct
  source 1..21: mol_type = other RNA
gtttcttcatctgtgagaggc

SEQ ID NO: 12363 - RNA, 21 nt, synthetic construct
  source 1..21: mol_type = other RNA
gtttgctctggagaatctcac

SEQ ID NO: 12364 - RNA, 21 nt, synthetic construct
  source 1..21: mol_type = other RNA
gtttgtagaatgcttggctgt

SEQ ID NO: 12365 - RNA, 21 nt, synthetic construct
  source 1..21: mol_type = other RNA
gtttgtgaacgcgtggagggg

SEQ ID NO: 12366 - RNA, 21 nt, synthetic construct
  source 1..21: mol_type = other RNA
gttttcaaaaccgaaagtaag

SEQ ID NO: 12367 - RNA, 21 nt, synthetic construct
  source 1..21: mol_type = other RNA
gttttcaaaattaaatgacgc

SEQ ID NO: 12368 - RNA, 21 nt, synthetic construct
  source 1..21: mol_type = other RNA
gttttgaaaacatgagggggt

SEQ ID NO: 12369 - RNA, 21 nt, synthetic construct
  source 1..21: mol_type = other RNA
taaaagtgacatgtgatggga

SEQ ID NO: 12370 - RNA, 21 nt, synthetic construct
  source 1..21: mol_type = other RNA
taaaatctcggtgccttagtt

SEQ ID NO: 12371 - RNA, 21 nt, synthetic construct
  source 1..21: mol_type = other RNA
taaactttgtcccgaccctcc

SEQ ID NO: 12372 - RNA, 21 nt, synthetic construct
  source 1..21: mol_type = other RNA
taaagtccttggcacacagaa

SEQ ID NO: 12373 - RNA, 21 nt, synthetic construct
  source 1..21: mol_type = other RNA
taaatgacgcaaagcacataa

SEQ ID NO: 12374 - RNA, 21 nt, synthetic construct
  source 1..21: mol_type = other RNA
taaatggcagcaatcgagatt

SEQ ID NO: 12375 - RNA, 21 nt, synthetic construct
  source 1..21: mol_type = other RNA
taacaaaaattagccgggtgt

SEQ ID NO: 12376 - RNA, 21 nt, synthetic construct
  source 1..21: mol_type = other RNA
taaccagggcttttgcgggag

SEQ ID NO: 12377 - RNA, 21 nt, synthetic construct
  source 1..21: mol_type = other RNA
taaccatagtagttatctatg

SEQ ID NO: 12378 - RNA, 21 nt, synthetic construct
  source 1..21: mol_type = other RNA
taacgggtagttcttataatt

SEQ ID NO: 12379 - RNA, 21 nt, synthetic construct
  source 1..21: mol_type = other RNA
taactactatggttatcttct

SEQ ID NO: 12380 - RNA, 21 nt, synthetic construct
  source 1..21: mol_type = other RNA
taacttatttgttcccatcac

SEQ ID NO: 12381 - RNA, 21 nt, synthetic construct
  source 1..21: mol_type = other RNA
taagaaaaacgcctgccttct

SEQ ID NO: 12382 - RNA, 21 nt, synthetic construct
  source 1..21: mol_type = other RNA
taagaaacttaattacacagg

SEQ ID NO: 12383 - RNA, 21 nt, synthetic construct
  source 1..21: mol_type = other RNA
taagaactacccgttattgac

SEQ ID NO: 12384 - RNA, 21 nt, synthetic construct
  source 1..21: mol_type = other RNA
taagaggcacagtacatcttg

SEQ ID NO: 12385 - RNA, 21 nt, synthetic construct
  source 1..21: mol_type = other RNA
taagcctgtctgctgcggctc

SEQ ID NO: 12386 - RNA, 21 nt, synthetic construct
  source 1..21: mol_type = other RNA
taagcgtcagagcgccgaggt

SEQ ID NO: 12387 - RNA, 21 nt, synthetic construct
  source 1..21: mol_type = other RNA
taagctaccacgcccaacccc

SEQ ID NO: 12388 - RNA, 21 nt, synthetic construct
  source 1..21: mol_type = other RNA
taaggcaccgagattttaaga

SEQ ID NO: 12389 - RNA, 21 nt, synthetic construct
  source 1..21: mol_type = other RNA
taagggaagcagagccgcagc

SEQ ID NO: 12390 - RNA, 21 nt, synthetic construct
  source 1..21: mol_type = other RNA
taagttaattattcgaaaccg

SEQ ID NO: 12391 - RNA, 21 nt, synthetic construct
  source 1..21: mol_type = other RNA
taagttcgcatgtcctagcac

SEQ ID NO: 12392 - RNA, 21 nt, synthetic construct
  source 1..21: mol_type = other RNA
taagtttcttaaaatctcggt

SEQ ID NO: 12393 - RNA, 21 nt, synthetic construct
  source 1..21: mol_type = other RNA
taataacaaaaattagccggg

SEQ ID NO: 12394 - RNA, 21 nt, synthetic construct
  source 1..21: mol_type = other RNA
taattacacaggggataaatg

SEQ ID NO: 12395 - RNA, 21 nt, synthetic construct
  source 1..21: mol_type = other RNA
taattattcgaaaccgctttg

SEQ ID NO: 12396 - RNA, 21 nt, synthetic construct
  source 1..21: mol_type = other RNA
tacaaacgtcgcgtgctgttt

SEQ ID NO: 12397 - RNA, 21 nt, synthetic construct
  source 1..21: mol_type = other RNA
tacaaagcggtttcgaataat

SEQ ID NO: 12398 - RNA, 21 nt, synthetic construct
  source 1..21: mol_type = other RNA
tacacaggggataaatggcag

SEQ ID NO: 12399 - RNA, 21 nt, synthetic construct
  source 1..21: mol_type = other RNA
tacagagggcttcctctttgg

SEQ ID NO: 12400 - RNA, 21 nt, synthetic construct
  source 1..21: mol_type = other RNA
tacagccaaaaggcatgcgct

SEQ ID NO: 12401 - RNA, 21 nt, synthetic construct
  source 1..21: mol_type = other RNA
tacaggcgtaagctaccacgc

SEQ ID NO: 12402 - RNA, 21 nt, synthetic construct
  source 1..21: mol_type = other RNA
tacatcttggaaacaaccagg

SEQ ID NO: 12403 - RNA, 21 nt, synthetic construct
  source 1..21: mol_type = other RNA
taccacgcccaaccccctcat

SEQ ID NO: 12404 - RNA, 21 nt, synthetic construct
  source 1..21: mol_type = other RNA
tacccgtcccccactccagct

SEQ ID NO: 12405 - RNA, 21 nt, synthetic construct
  source 1..21: mol_type = other RNA
tacccgttattgacatctttc

SEQ ID NO: 12406 - RNA, 21 nt, synthetic construct
  source 1..21: mol_type = other RNA
taccctcccgctctggtcctt

SEQ ID NO: 12407 - RNA, 21 nt, synthetic construct
  source 1..21: mol_type = other RNA
tacgaaaagaccacagggccc

SEQ ID NO: 12408 - RNA, 21 nt, synthetic construct
  source 1..21: mol_type = other RNA
tacggacctcaagccatcctc

SEQ ID NO: 12409 - RNA, 21 nt, synthetic construct
  source 1..21: mol_type = other RNA
tacggcgacgggagggtcggg

SEQ ID NO: 12410 - RNA, 21 nt, synthetic construct
  source 1..21: mol_type = other RNA
tactatggttatcttctgcct

SEQ ID NO: 12411 - RNA, 21 nt, synthetic construct
  source 1..21: mol_type = other RNA
tactgtgcctcttactttcgg

SEQ ID NO: 12412 - RNA, 21 nt, synthetic construct
  source 1..21: mol_type = other RNA
tacttgcccctttcggcgggg

SEQ ID NO: 12413 - RNA, 21 nt, synthetic construct
  source 1..21: mol_type = other RNA
tactttcggttttgaaaacat

SEQ ID NO: 12414 - RNA, 21 nt, synthetic construct
  source 1..21: mol_type = other RNA
tagaatgcttggctgtgatac

SEQ ID NO: 12415 - RNA, 21 nt, synthetic construct
  source 1..21: mol_type = other RNA
tagacccagaggtgctaggac

SEQ ID NO: 12416 - RNA, 21 nt, synthetic construct
  source 1..21: mol_type = other RNA
tagacgaagtccacagctctc

SEQ ID NO: 12417 - RNA, 21 nt, synthetic construct
  source 1..21: mol_type = other RNA
tagactggagagctgtggact

SEQ ID NO: 12418 - RNA, 21 nt, synthetic construct
  source 1..21: mol_type = other RNA
tagataactactatggttatc

SEQ ID NO: 12419 - RNA, 21 nt, synthetic construct
  source 1..21: mol_type = other RNA
tagcacctctgggtctatgtg

SEQ ID NO: 12420 - RNA, 21 nt, synthetic construct
  source 1..21: mol_type = other RNA
tagccccacggcgggccacca

SEQ ID NO: 12421 - RNA, 21 nt, synthetic construct
  source 1..21: mol_type = other RNA
tagccgggtgtggtggctcgt

SEQ ID NO: 12422 - RNA, 21 nt, synthetic construct
  source 1..21: mol_type = other RNA
tagcgggcgcctagacgaagt

SEQ ID NO: 12423 - RNA, 21 nt, synthetic construct
  source 1..21: mol_type = other RNA
tagctcaaaagcctaagctca

SEQ ID NO: 12424 - RNA, 21 nt, synthetic construct
  source 1..21: mol_type = other RNA
taggacatgcgaacttagcgg

SEQ ID NO: 12425 - RNA, 21 nt, synthetic construct
  source 1..21: mol_type = other RNA
taggccaaaggtctcccctgc

SEQ ID NO: 12426 - RNA, 21 nt, synthetic construct
  source 1..21: mol_type = other RNA
taggcgcccgctaagttcgca

SEQ ID NO: 12427 - RNA, 21 nt, synthetic construct
  source 1..21: mol_type = other RNA
taggctcgtcccaaaggcgcg

SEQ ID NO: 12428 - RNA, 21 nt, synthetic construct
  source 1..21: mol_type = other RNA
taggcttgacttcaatctcga

SEQ ID NO: 12429 - RNA, 21 nt, synthetic construct
  source 1..21: mol_type = other RNA
taggcttttgagctatcatgg

SEQ ID NO: 12430 - RNA, 21 nt, synthetic construct
  source 1..21: mol_type = other RNA
tagggaggccgaggcgggagg

SEQ ID NO: 12431 - RNA, 21 nt, synthetic construct
  source 1..21: mol_type = other RNA
tagggcgtcgataagcgtcag

SEQ ID NO: 12432 - RNA, 21 nt, synthetic construct
  source 1..21: mol_type = other RNA
tagtagttatctatggcggaa

SEQ ID NO: 12433 - RNA, 21 nt, synthetic construct
  source 1..21: mol_type = other RNA
tagtccagggctggatctcgg

SEQ ID NO: 12434 - RNA, 21 nt, synthetic construct
  source 1..21: mol_type = other RNA
tagttatctatggcggaagat

SEQ ID NO: 12435 - RNA, 21 nt, synthetic construct
  source 1..21: mol_type = other RNA
tagtttcttcatctgtgagag

SEQ ID NO: 12436 - RNA, 21 nt, synthetic construct
  source 1..21: mol_type = other RNA
tataagaactacccgttattg

SEQ ID NO: 12437 - RNA, 21 nt, synthetic construct
  source 1..21: mol_type = other RNA
tatcacagccaagcattctac

SEQ ID NO: 12438 - RNA, 21 nt, synthetic construct
  source 1..21: mol_type = other RNA
tatcatggcgccagtgcactc

SEQ ID NO: 12439 - RNA, 21 nt, synthetic construct
  source 1..21: mol_type = other RNA
tatcccctgtgtaattaagtt

SEQ ID NO: 12440 - RNA, 21 nt, synthetic construct
  source 1..21: mol_type = other RNA
tatcgacgccctaaactttgt

SEQ ID NO: 12441 - RNA, 21 nt, synthetic construct
  source 1..21: mol_type = other RNA
tatctatggcggaagataact

SEQ ID NO: 12442 - RNA, 21 nt, synthetic construct
  source 1..21: mol_type = other RNA
tatcttccgccatagataact

SEQ ID NO: 12443 - RNA, 21 nt, synthetic construct
  source 1..21: mol_type = other RNA
tatcttctgcctctcacagat

SEQ ID NO: 12444 - RNA, 21 nt, synthetic construct
  source 1..21: mol_type = other RNA
tatggcggaagataactgttt

SEQ ID NO: 12445 - RNA, 21 nt, synthetic construct
  source 1..21: mol_type = other RNA
tatggttatcttctgcctctc

SEQ ID NO: 12446 - RNA, 21 nt, synthetic construct
  source 1..21: mol_type = other RNA
tatgtgctttgcgtcatttaa

SEQ ID NO: 12447 - RNA, 21 nt, synthetic construct
  source 1..21: mol_type = other RNA
tatgtggggccacaccgtggg

SEQ ID NO: 12448 - RNA, 21 nt, synthetic construct
  source 1..21: mol_type = other RNA
tattcgaaaccgctttgtatc

SEQ ID NO: 12449 - RNA, 21 nt, synthetic construct
  source 1..21: mol_type = other RNA
tattgacatctttctgtgtgc

SEQ ID NO: 12450 - RNA, 21 nt, synthetic construct
  source 1..21: mol_type = other RNA
tatttgttcccatcacatgtc

SEQ ID NO: 12451 - RNA, 21 nt, synthetic construct
  source 1..21: mol_type = other RNA
tattttttgtagagaccaggc

SEQ ID NO: 12452 - RNA, 21 nt, synthetic construct
  source 1..21: mol_type = other RNA
tcaaaaccgaaagtaagaggc

SEQ ID NO: 12453 - RNA, 21 nt, synthetic construct
  source 1..21: mol_type = other RNA
tcaaaagcctaagctcaagag

SEQ ID NO: 12454 - RNA, 21 nt, synthetic construct
  source 1..21: mol_type = other RNA
tcaaaattaaatgacgcaaag

SEQ ID NO: 12455 - RNA, 21 nt, synthetic construct
  source 1..21: mol_type = other RNA
tcaactacggacctcaagcca

SEQ ID NO: 12456 - RNA, 21 nt, synthetic construct
  source 1..21: mol_type = other RNA
tcaagagatcctcccgcctca

SEQ ID NO: 12457 - RNA, 21 nt, synthetic construct
  source 1..21: mol_type = other RNA
tcaagccatcctcccgcctcg

SEQ ID NO: 12458 - RNA, 21 nt, synthetic construct
  source 1..21: mol_type = other RNA
tcaagcctaaccagggctttt

SEQ ID NO: 12459 - RNA, 21 nt, synthetic construct
  source 1..21: mol_type = other RNA
tcaataacgggtagttcttat

SEQ ID NO: 12460 - RNA, 21 nt, synthetic construct
  source 1..21: mol_type = other RNA
tcaatctcgattgctgccatt

SEQ ID NO: 12461 - RNA, 21 nt, synthetic construct
  source 1..21: mol_type = other RNA
tcacaaacctcagcgccgcgc

SEQ ID NO: 12462 - RNA, 21 nt, synthetic construct
  source 1..21: mol_type = other RNA
tcacagatgaagaaactaagg

SEQ ID NO: 12463 - RNA, 21 nt, synthetic construct
  source 1..21: mol_type = other RNA
tcacagccaagcattctacaa

SEQ ID NO: 12464 - RNA, 21 nt, synthetic construct
  source 1..21: mol_type = other RNA
tcacgcagaaggcaggcgttt

SEQ ID NO: 12465 - RNA, 21 nt, synthetic construct
  source 1..21: mol_type = other RNA
tcacggagcgagagagcacag

SEQ ID NO: 12466 - RNA, 21 nt, synthetic construct
  source 1..21: mol_type = other RNA
tcagagcgccgaggttggggg

SEQ ID NO: 12467 - RNA, 21 nt, synthetic construct
  source 1..21: mol_type = other RNA
tcagccaccggagcagctggg

SEQ ID NO: 12468 - RNA, 21 nt, synthetic construct
  source 1..21: mol_type = other RNA
tcagcgccgcgcctttgggac

SEQ ID NO: 12469 - RNA, 21 nt, synthetic construct
  source 1..21: mol_type = other RNA
tcatctgtgagaggcagaaga

SEQ ID NO: 12470 - RNA, 21 nt, synthetic construct
  source 1..21: mol_type = other RNA
tcatggcgccagtgcactcca

SEQ ID NO: 12471 - RNA, 21 nt, synthetic construct
  source 1..21: mol_type = other RNA
tcatgttttcaaaaccgaaag

SEQ ID NO: 12472 - RNA, 21 nt, synthetic construct
  source 1..21: mol_type = other RNA
tccaagatgtactgtgcctct

SEQ ID NO: 12473 - RNA, 21 nt, synthetic construct
  source 1..21: mol_type = other RNA
tccaagttctccttggtggcc

SEQ ID NO: 12474 - RNA, 21 nt, synthetic construct
  source 1..21: mol_type = other RNA
tccacagctctccagtctaag

SEQ ID NO: 12475 - RNA, 21 nt, synthetic construct
  source 1..21: mol_type = other RNA
tccacgcgttcacaaacctca

SEQ ID NO: 12476 - RNA, 21 nt, synthetic construct
  source 1..21: mol_type = other RNA
tccagagcaaactgggcggca

SEQ ID NO: 12477 - RNA, 21 nt, synthetic construct
  source 1..21: mol_type = other RNA
tccagccctggactagcccca

SEQ ID NO: 12478 - RNA, 21 nt, synthetic construct
  source 1..21: mol_type = other RNA
tccagctgcgctgggggagcc

SEQ ID NO: 12479 - RNA, 21 nt, synthetic construct
  source 1..21: mol_type = other RNA
tccagggctggatctcgggga

SEQ ID NO: 12480 - RNA, 21 nt, synthetic construct
  source 1..21: mol_type = other RNA
tccagtctaagggaagcagag

SEQ ID NO: 12481 - RNA, 21 nt, synthetic construct
  source 1..21: mol_type = other RNA
tcccaaaggcgcggcgctgag

SEQ ID NO: 12482 - RNA, 21 nt, synthetic construct
  source 1..21: mol_type = other RNA
tcccagctgctccggtggctg

SEQ ID NO: 12483 - RNA, 21 nt, synthetic construct
  source 1..21: mol_type = other RNA
tcccaggccaccccgccgctt

SEQ ID NO: 12484 - RNA, 21 nt, synthetic construct
  source 1..21: mol_type = other RNA
tcccatcacatgtcactttta

SEQ ID NO: 12485 - RNA, 21 nt, synthetic construct
  source 1..21: mol_type = other RNA
tccccacggtgtggccccaca

SEQ ID NO: 12486 - RNA, 21 nt, synthetic construct
  source 1..21: mol_type = other RNA
tccccactcccaggccacccc

SEQ ID NO: 12487 - RNA, 21 nt, synthetic construct
  source 1..21: mol_type = other RNA
tcccccaacctcggcgctctg

SEQ ID NO: 12488 - RNA, 21 nt, synthetic construct
  source 1..21: mol_type = other RNA
tcccccactccagctgcgctg

SEQ ID NO: 12489 - RNA, 21 nt, synthetic construct
  source 1..21: mol_type = other RNA
tcccccagaccccaagcgccc

SEQ ID NO: 12490 - RNA, 21 nt, synthetic construct
  source 1..21: mol_type = other RNA
tcccccagcgcagctggagtg

SEQ ID NO: 12491 - RNA, 21 nt, synthetic construct
  source 1..21: mol_type = other RNA
tccccgagatccagccctgga

SEQ ID NO: 12492 - RNA, 21 nt, synthetic construct
  source 1..21: mol_type = other RNA
tccccgccgaaaggggcaagt

SEQ ID NO: 12493 - RNA, 21 nt, synthetic construct
  source 1..21: mol_type = other RNA
tcccctgctccccgccgaaag

SEQ ID NO: 12494 - RNA, 21 nt, synthetic construct
  source 1..21: mol_type = other RNA
tcccctgtgtaattaagtttc

SEQ ID NO: 12495 - RNA, 21 nt, synthetic construct
  source 1..21: mol_type = other RNA
tcccgaccctcccgtcgccgt

SEQ ID NO: 12496 - RNA, 21 nt, synthetic construct
  source 1..21: mol_type = other RNA
tcccgcaaaagccctggttag

SEQ ID NO: 12497 - RNA, 21 nt, synthetic construct
  source 1..21: mol_type = other RNA
tcccgcctcagccaccggagc

SEQ ID NO: 12498 - RNA, 21 nt, synthetic construct
  source 1..21: mol_type = other RNA
tcccgctctgcaccctctgtg

SEQ ID NO: 12499 - RNA, 21 nt, synthetic construct
  source 1..21: mol_type = other RNA
tcccgctctggtccttcctct

SEQ ID NO: 12500 - RNA, 21 nt, synthetic construct
  source 1..21: mol_type = other RNA
tcccgggtgcgcacccccttc

SEQ ID NO: 12501 - RNA, 21 nt, synthetic construct
  source 1..21: mol_type = other RNA
tcccgtcgccgtaggccaaag

SEQ ID NO: 12502 - RNA, 21 nt, synthetic construct
  source 1..21: mol_type = other RNA
tcccttagactggagagctgt

SEQ ID NO: 12503 - RNA, 21 nt, synthetic construct
  source 1..21: mol_type = other RNA
tcccttctccaagttctcctt

SEQ ID NO: 12504 - RNA, 21 nt, synthetic construct
  source 1..21: mol_type = other RNA
tccgccatagataactactat

SEQ ID NO: 12505 - RNA, 21 nt, synthetic construct
  source 1..21: mol_type = other RNA
tccgctctttcgcggggcctc

SEQ ID NO: 12506 - RNA, 21 nt, synthetic construct
  source 1..21: mol_type = other RNA
tccggtggctgaggcgggagg

SEQ ID NO: 12507 - RNA, 21 nt, synthetic construct
  source 1..21: mol_type = other RNA
tccgtagttgagaccagcctg

SEQ ID NO: 12508 - RNA, 21 nt, synthetic construct
  source 1..21: mol_type = other RNA
tccgtgacttcccttctccaa

SEQ ID NO: 12509 - RNA, 21 nt, synthetic construct
  source 1..21: mol_type = other RNA
tcctaccctcccgctctggtc

SEQ ID NO: 12510 - RNA, 21 nt, synthetic construct
  source 1..21: mol_type = other RNA
tcctagcacctctgggtctat

SEQ ID NO: 12511 - RNA, 21 nt, synthetic construct
  source 1..21: mol_type = other RNA
tcctccccacggtgtggcccc

SEQ ID NO: 12512 - RNA, 21 nt, synthetic construct
  source 1..21: mol_type = other RNA
tcctcccgcctcagccaccgg

SEQ ID NO: 12513 - RNA, 21 nt, synthetic construct
  source 1..21: mol_type = other RNA
tcctctcccgctctgcaccct

SEQ ID NO: 12514 - RNA, 21 nt, synthetic construct
  source 1..21: mol_type = other RNA
tcctctttggctctttgcctg

SEQ ID NO: 12515 - RNA, 21 nt, synthetic construct
  source 1..21: mol_type = other RNA
tccttcctctcccgctctgca

SEQ ID NO: 12516 - RNA, 21 nt, synthetic construct
  source 1..21: mol_type = other RNA
tccttggcacacagaaagatg

SEQ ID NO: 12517 - RNA, 21 nt, synthetic construct
  source 1..21: mol_type = other RNA
tccttggtggcccgccgtggg

SEQ ID NO: 12518 - RNA, 21 nt, synthetic construct
  source 1..21: mol_type = other RNA
tcgaaaccgctttgtatcaca

SEQ ID NO: 12519 - RNA, 21 nt, synthetic construct
  source 1..21: mol_type = other RNA
tcgacgccctaaactttgtcc

SEQ ID NO: 12520 - RNA, 21 nt, synthetic construct
  source 1..21: mol_type = other RNA
tcgagattgaagtcaagccta

SEQ ID NO: 12521 - RNA, 21 nt, synthetic construct
  source 1..21: mol_type = other RNA
tcgataagcgtcagagcgccg

SEQ ID NO: 12522 - RNA, 21 nt, synthetic construct
  source 1..21: mol_type = other RNA
tcgattgctgccatttatccc

SEQ ID NO: 12523 - RNA, 21 nt, synthetic construct
  source 1..21: mol_type = other RNA
tcgcatgtcctagcacctctg

SEQ ID NO: 12524 - RNA, 21 nt, synthetic construct
  source 1..21: mol_type = other RNA
tcgcccgggtaagcctgtctg

SEQ ID NO: 12525 - RNA, 21 nt, synthetic construct
  source 1..21: mol_type = other RNA
tcgccgtaggccaaaggtctc

SEQ ID NO: 12526 - RNA, 21 nt, synthetic construct
  source 1..21: mol_type = other RNA
tcgcgtgctgtttcctcccca

SEQ ID NO: 12527 - RNA, 21 nt, synthetic construct
  source 1..21: mol_type = other RNA
tcgctccgtgacttcccttct

SEQ ID NO: 12528 - RNA, 21 nt, synthetic construct
  source 1..21: mol_type = other RNA
tcgctctgttgcccacgctgg

SEQ ID NO: 12529 - RNA, 21 nt, synthetic construct
  source 1..21: mol_type = other RNA
tcgctgtgctctctcgctccg

SEQ ID NO: 12530 - RNA, 21 nt, synthetic construct
  source 1..21: mol_type = other RNA
tcggcgctctgacgcttatcg

SEQ ID NO: 12531 - RNA, 21 nt, synthetic construct
  source 1..21: mol_type = other RNA
tcggcggggagcaggggagac

SEQ ID NO: 12532 - RNA, 21 nt, synthetic construct
  source 1..21: mol_type = other RNA
tcgggacaaagtttagggcgt

SEQ ID NO: 12533 - RNA, 21 nt, synthetic construct
  source 1..21: mol_type = other RNA
tcggtgccttagtttcttcat

SEQ ID NO: 12534 - RNA, 21 nt, synthetic construct
  source 1..21: mol_type = other RNA
tcggttttgaaaacatgaggg

SEQ ID NO: 12535 - RNA, 21 nt, synthetic construct
  source 1..21: mol_type = other RNA
tcgtacagagggcttcctctt

SEQ ID NO: 12536 - RNA, 21 nt, synthetic construct
  source 1..21: mol_type = other RNA
tcgtcccaaaggcgcggcgct

SEQ ID NO: 12537 - RNA, 21 nt, synthetic construct
  source 1..21: mol_type = other RNA
tcgtctaggcgcccgctaagt

SEQ ID NO: 12538 - RNA, 21 nt, synthetic construct
  source 1..21: mol_type = other RNA
tcgtgcctgtggtcccagctg

SEQ ID NO: 12539 - RNA, 21 nt, synthetic construct
  source 1..21: mol_type = other RNA
tctaagggaagcagagccgca

SEQ ID NO: 12540 - RNA, 21 nt, synthetic construct
  source 1..21: mol_type = other RNA
tctacaaacgtcgcgtgctgt

SEQ ID NO: 12541 - RNA, 21 nt, synthetic construct
  source 1..21: mol_type = other RNA
tctaggcgcccgctaagttcg

SEQ ID NO: 12542 - RNA, 21 nt, synthetic construct
  source 1..21: mol_type = other RNA
tctatggcggaagataactgt

SEQ ID NO: 12543 - RNA, 21 nt, synthetic construct
  source 1..21: mol_type = other RNA
tctatgtggggccacaccgtg

SEQ ID NO: 12544 - RNA, 21 nt, synthetic construct
  source 1..21: mol_type = other RNA
tctcaactacggacctcaagc

SEQ ID NO: 12545 - RNA, 21 nt, synthetic construct
  source 1..21: mol_type = other RNA
tctcacagatgaagaaactaa

SEQ ID NO: 12546 - RNA, 21 nt, synthetic construct
  source 1..21: mol_type = other RNA
tctcacgcagaaggcaggcgt

SEQ ID NO: 12547 - RNA, 21 nt, synthetic construct
  source 1..21: mol_type = other RNA
tctccaagttctccttggtgg

SEQ ID NO: 12548 - RNA, 21 nt, synthetic construct
  source 1..21: mol_type = other RNA
tctccagagcaaactgggcgg

SEQ ID NO: 12549 - RNA, 21 nt, synthetic construct
  source 1..21: mol_type = other RNA
tctccagtctaagggaagcag

SEQ ID NO: 12550 - RNA, 21 nt, synthetic construct
  source 1..21: mol_type = other RNA
tctcccctgctccccgccgaa

SEQ ID NO: 12551 - RNA, 21 nt, synthetic construct
  source 1..21: mol_type = other RNA
tctcccgctctgcaccctctg

SEQ ID NO: 12552 - RNA, 21 nt, synthetic construct
  source 1..21: mol_type = other RNA
tctcctaccctcccgctctgg

SEQ ID NO: 12553 - RNA, 21 nt, synthetic construct
  source 1..21: mol_type = other RNA
tctccttggtggcccgccgtg

SEQ ID NO: 12554 - RNA, 21 nt, synthetic construct
  source 1..21: mol_type = other RNA
tctcgattgctgccatttatc

SEQ ID NO: 12555 - RNA, 21 nt, synthetic construct
  source 1..21: mol_type = other RNA
tctcgctccgtgacttccctt

SEQ ID NO: 12556 - RNA, 21 nt, synthetic construct
  source 1..21: mol_type = other RNA
tctcggggaagcggcggggtg

SEQ ID NO: 12557 - RNA, 21 nt, synthetic construct
  source 1..21: mol_type = other RNA
tctcggtgccttagtttcttc

SEQ ID NO: 12558 - RNA, 21 nt, synthetic construct
  source 1..21: mol_type = other RNA
tctctcctaccctcccgctct

SEQ ID NO: 12559 - RNA, 21 nt, synthetic construct
  source 1..21: mol_type = other RNA
tctctcgctccgtgacttccc

SEQ ID NO: 12560 - RNA, 21 nt, synthetic construct
  source 1..21: mol_type = other RNA
tctcttccgctctttcgcggg

SEQ ID NO: 12561 - RNA, 21 nt, synthetic construct
  source 1..21: mol_type = other RNA
tctcttgagcttaggcttttg

SEQ ID NO: 12562 - RNA, 21 nt, synthetic construct
  source 1..21: mol_type = other RNA
tctgacgcttatcgacgccct

SEQ ID NO: 12563 - RNA, 21 nt, synthetic construct
  source 1..21: mol_type = other RNA
tctgcaccctctgtggccctc

SEQ ID NO: 12564 - RNA, 21 nt, synthetic construct
  source 1..21: mol_type = other RNA
tctgcctctcacagatgaaga

SEQ ID NO: 12565 - RNA, 21 nt, synthetic construct
  source 1..21: mol_type = other RNA
tctgcgtgagattctccagag

SEQ ID NO: 12566 - RNA, 21 nt, synthetic construct
  source 1..21: mol_type = other RNA
tctgctgcggctctgcttccc

SEQ ID NO: 12567 - RNA, 21 nt, synthetic construct
  source 1..21: mol_type = other RNA
tctgcttcccttagactggag

SEQ ID NO: 12568 - RNA, 21 nt, synthetic construct
  source 1..21: mol_type = other RNA
tctggagaatctcacgcagaa

SEQ ID NO: 12569 - RNA, 21 nt, synthetic construct
  source 1..21: mol_type = other RNA
tctggctcccccagcgcagct

SEQ ID NO: 12570 - RNA, 21 nt, synthetic construct
  source 1..21: mol_type = other RNA
tctgggtctatgtggggccac

SEQ ID NO: 12571 - RNA, 21 nt, synthetic construct
  source 1..21: mol_type = other RNA
tctggtccttcctctcccgct

SEQ ID NO: 12572 - RNA, 21 nt, synthetic construct
  source 1..21: mol_type = other RNA
tctgtacgaaaagaccacagg

SEQ ID NO: 12573 - RNA, 21 nt, synthetic construct
  source 1..21: mol_type = other RNA
tctgtgagaggcagaagataa

SEQ ID NO: 12574 - RNA, 21 nt, synthetic construct
  source 1..21: mol_type = other RNA
tctgtggccctcgctgtgctc

SEQ ID NO: 12575 - RNA, 21 nt, synthetic construct
  source 1..21: mol_type = other RNA
tctgtgtgccaaggactttat

SEQ ID NO: 12576 - RNA, 21 nt, synthetic construct
  source 1..21: mol_type = other RNA
tctgttgcccacgctggagtg

SEQ ID NO: 12577 - RNA, 21 nt, synthetic construct
  source 1..21: mol_type = other RNA
tcttaaaatctcggtgcctta

SEQ ID NO: 12578 - RNA, 21 nt, synthetic construct
  source 1..21: mol_type = other RNA
tcttactttcggttttgaaaa

SEQ ID NO: 12579 - RNA, 21 nt, synthetic construct
  source 1..21: mol_type = other RNA
tcttcatctgtgagaggcaga

SEQ ID NO: 12580 - RNA, 21 nt, synthetic construct
  source 1..21: mol_type = other RNA
tcttccgccatagataactac

SEQ ID NO: 12581 - RNA, 21 nt, synthetic construct
  source 1..21: mol_type = other RNA
tcttccgctctttcgcggggc

SEQ ID NO: 12582 - RNA, 21 nt, synthetic construct
  source 1..21: mol_type = other RNA
tcttctgcctctcacagatga

SEQ ID NO: 12583 - RNA, 21 nt, synthetic construct
  source 1..21: mol_type = other RNA
tcttgagcttaggcttttgag

SEQ ID NO: 12584 - RNA, 21 nt, synthetic construct
  source 1..21: mol_type = other RNA
tcttggaaacaaccaggcaaa

SEQ ID NO: 12585 - RNA, 21 nt, synthetic construct
  source 1..21: mol_type = other RNA
tctttcgcggggcctctggct

SEQ ID NO: 12586 - RNA, 21 nt, synthetic construct
  source 1..21: mol_type = other RNA
tctttctgtgtgccaaggact

SEQ ID NO: 12587 - RNA, 21 nt, synthetic construct
  source 1..21: mol_type = other RNA
tctttgcctggttgtttccaa

SEQ ID NO: 12588 - RNA, 21 nt, synthetic construct
  source 1..21: mol_type = other RNA
tctttggctctttgcctggtt

SEQ ID NO: 12589 - RNA, 21 nt, synthetic construct
  source 1..21: mol_type = other RNA
tcttttcgtacagagggcttc

SEQ ID NO: 12590 - RNA, 21 nt, synthetic construct
  source 1..21: mol_type = other RNA
tgaaaacagttatcttccgcc

SEQ ID NO: 12591 - RNA, 21 nt, synthetic construct
  source 1..21: mol_type = other RNA
tgaaaacatgagggggttggg

SEQ ID NO: 12592 - RNA, 21 nt, synthetic construct
  source 1..21: mol_type = other RNA
tgaacgcgtggaggggcgctt

SEQ ID NO: 12593 - RNA, 21 nt, synthetic construct
  source 1..21: mol_type = other RNA
tgaagaaactaaggcaccgag

SEQ ID NO: 12594 - RNA, 21 nt, synthetic construct
  source 1..21: mol_type = other RNA
tgaagcctggtctctacaaaa

SEQ ID NO: 12595 - RNA, 21 nt, synthetic construct
  source 1..21: mol_type = other RNA
tgaagtcaagcctaaccaggg

SEQ ID NO: 12596 - RNA, 21 nt, synthetic construct
  source 1..21: mol_type = other RNA
tgacatctttctgtgtgccaa

SEQ ID NO: 12597 - RNA, 21 nt, synthetic construct
  source 1..21: mol_type = other RNA
tgacatgtgatgggaacaaat

SEQ ID NO: 12598 - RNA, 21 nt, synthetic construct
  source 1..21: mol_type = other RNA
tgacgcaaagcacataaagtc

SEQ ID NO: 12599 - RNA, 21 nt, synthetic construct
  source 1..21: mol_type = other RNA
tgacgcttatcgacgccctaa

SEQ ID NO: 12600 - RNA, 21 nt, synthetic construct
  source 1..21: mol_type = other RNA
tgacttcaatctcgattgctg

SEQ ID NO: 12601 - RNA, 21 nt, synthetic construct
  source 1..21: mol_type = other RNA
tgacttcccttctccaagttc

SEQ ID NO: 12602 - RNA, 21 nt, synthetic construct
  source 1..21: mol_type = other RNA
tgagaggcagaagataaccat

SEQ ID NO: 12603 - RNA, 21 nt, synthetic construct
  source 1..21: mol_type = other RNA
tgagattctccagagcaaact

SEQ ID NO: 12604 - RNA, 21 nt, synthetic construct
  source 1..21: mol_type = other RNA
tgagctatcatggcgccagtg

SEQ ID NO: 12605 - RNA, 21 nt, synthetic construct
  source 1..21: mol_type = other RNA
tgagcttaggcttttgagcta

SEQ ID NO: 12606 - RNA, 21 nt, synthetic construct
  source 1..21: mol_type = other RNA
tgaggcgggaggatctcttga

SEQ ID NO: 12607 - RNA, 21 nt, synthetic construct
  source 1..21: mol_type = other RNA
tgagggggttgggcgtggtag

SEQ ID NO: 12608 - RNA, 21 nt, synthetic construct
  source 1..21: mol_type = other RNA
tgaggtccgtagttgagacca

SEQ ID NO: 12609 - RNA, 21 nt, synthetic construct
  source 1..21: mol_type = other RNA
tgaggtttgtgaacgcgtgga

SEQ ID NO: 12610 - RNA, 21 nt, synthetic construct
  source 1..21: mol_type = other RNA
tgagtctctcctaccctcccg

SEQ ID NO: 12611 - RNA, 21 nt, synthetic construct
  source 1..21: mol_type = other RNA
tgatacaaagcggtttcgaat

SEQ ID NO: 12612 - RNA, 21 nt, synthetic construct
  source 1..21: mol_type = other RNA
tgatagctcaaaagcctaagc

SEQ ID NO: 12613 - RNA, 21 nt, synthetic construct
  source 1..21: mol_type = other RNA
tgatgggaacaaataagttaa

SEQ ID NO: 12614 - RNA, 21 nt, synthetic construct
  source 1..21: mol_type = other RNA
tgcaccctctgtggccctcgc

SEQ ID NO: 12615 - RNA, 21 nt, synthetic construct
  source 1..21: mol_type = other RNA
tgcacgaattacagccaaaag

SEQ ID NO: 12616 - RNA, 21 nt, synthetic construct
  source 1..21: mol_type = other RNA
tgcactggcgccatgatagct

SEQ ID NO: 12617 - RNA, 21 nt, synthetic construct
  source 1..21: mol_type = other RNA
tgcagagcgggagaggaagga

SEQ ID NO: 12618 - RNA, 21 nt, synthetic construct
  source 1..21: mol_type = other RNA
tgccaaggactttatgtgctt

SEQ ID NO: 12619 - RNA, 21 nt, synthetic construct
  source 1..21: mol_type = other RNA
tgccatttatcccctgtgtaa

SEQ ID NO: 12620 - RNA, 21 nt, synthetic construct
  source 1..21: mol_type = other RNA
tgcccacgctggagtgcactg

SEQ ID NO: 12621 - RNA, 21 nt, synthetic construct
  source 1..21: mol_type = other RNA
tgcccctttcggcggggagca

SEQ ID NO: 12622 - RNA, 21 nt, synthetic construct
  source 1..21: mol_type = other RNA
tgccgcccagtttgctctgga

SEQ ID NO: 12623 - RNA, 21 nt, synthetic construct
  source 1..21: mol_type = other RNA
tgcctctcacagatgaagaaa

SEQ ID NO: 12624 - RNA, 21 nt, synthetic construct
  source 1..21: mol_type = other RNA
tgcctcttactttcggttttg

SEQ ID NO: 12625 - RNA, 21 nt, synthetic construct
  source 1..21: mol_type = other RNA
tgcctggttgtttccaagatg

SEQ ID NO: 12626 - RNA, 21 nt, synthetic construct
  source 1..21: mol_type = other RNA
tgcctgtggtcccagctgctc

SEQ ID NO: 12627 - RNA, 21 nt, synthetic construct
  source 1..21: mol_type = other RNA
tgccttagtttcttcatctgt

SEQ ID NO: 12628 - RNA, 21 nt, synthetic construct
  source 1..21: mol_type = other RNA
tgccttctgcgtgagattctc

SEQ ID NO: 12629 - RNA, 21 nt, synthetic construct
  source 1..21: mol_type = other RNA
tgccttttggctgtaattcgt

SEQ ID NO: 12630 - RNA, 21 nt, synthetic construct
  source 1..21: mol_type = other RNA
tgcgaacttagcgggcgccta

SEQ ID NO: 12631 - RNA, 21 nt, synthetic construct
  source 1..21: mol_type = other RNA
tgcgcacccccttccccactc

SEQ ID NO: 12632 - RNA, 21 nt, synthetic construct
  source 1..21: mol_type = other RNA
tgcgctcccgcaaaagccctg

SEQ ID NO: 12633 - RNA, 21 nt, synthetic construct
  source 1..21: mol_type = other RNA
tgcgctgggggagccagaggc

SEQ ID NO: 12634 - RNA, 21 nt, synthetic construct
  source 1..21: mol_type = other RNA
tgcggctctgcttcccttaga

SEQ ID NO: 12635 - RNA, 21 nt, synthetic construct
  source 1..21: mol_type = other RNA
tgcgggagcgcatgccttttg

SEQ ID NO: 12636 - RNA, 21 nt, synthetic construct
  source 1..21: mol_type = other RNA
tgcgtgagattctccagagca

SEQ ID NO: 12637 - RNA, 21 nt, synthetic construct
  source 1..21: mol_type = other RNA
tgctaggacatgcgaacttag

SEQ ID NO: 12638 - RNA, 21 nt, synthetic construct
  source 1..21: mol_type = other RNA
tgctccccgccgaaaggggca

SEQ ID NO: 12639 - RNA, 21 nt, synthetic construct
  source 1..21: mol_type = other RNA
tgctccggtggctgaggcggg

SEQ ID NO: 12640 - RNA, 21 nt, synthetic construct
  source 1..21: mol_type = other RNA
tgctctctcgctccgtgactt

SEQ ID NO: 12641 - RNA, 21 nt, synthetic construct
  source 1..21: mol_type = other RNA
tgctctggagaatctcacgca

SEQ ID NO: 12642 - RNA, 21 nt, synthetic construct
  source 1..21: mol_type = other RNA
tgctgccatttatcccctgtg

SEQ ID NO: 12643 - RNA, 21 nt, synthetic construct
  source 1..21: mol_type = other RNA
tgctgcggctctgcttccctt

SEQ ID NO: 12644 - RNA, 21 nt, synthetic construct
  source 1..21: mol_type = other RNA
tgctgtttcctccccacggtg

SEQ ID NO: 12645 - RNA, 21 nt, synthetic construct
  source 1..21: mol_type = other RNA
tgcttcccttagactggagag

SEQ ID NO: 12646 - RNA, 21 nt, synthetic construct
  source 1..21: mol_type = other RNA
tgcttggctgtgatacaaagc

SEQ ID NO: 12647 - RNA, 21 nt, synthetic construct
  source 1..21: mol_type = other RNA
tgctttgcgtcatttaatttt

SEQ ID NO: 12648 - RNA, 21 nt, synthetic construct
  source 1..21: mol_type = other RNA
tggaaacaaccaggcaaagag

SEQ ID NO: 12649 - RNA, 21 nt, synthetic construct
  source 1..21: mol_type = other RNA
tggactagccccacggcgggc

SEQ ID NO: 12650 - RNA, 21 nt, synthetic construct
  source 1..21: mol_type = other RNA
tggacttcgtctaggcgcccg

SEQ ID NO: 12651 - RNA, 21 nt, synthetic construct
  source 1..21: mol_type = other RNA
tggagaagggaagtcacggag

SEQ ID NO: 12652 - RNA, 21 nt, synthetic construct
  source 1..21: mol_type = other RNA
tggagaatctcacgcagaagg

SEQ ID NO: 12653 - RNA, 21 nt, synthetic construct
  source 1..21: mol_type = other RNA
tggagagctgtggacttcgtc

SEQ ID NO: 12654 - RNA, 21 nt, synthetic construct
  source 1..21: mol_type = other RNA
tggaggggcgcttggggtctg

SEQ ID NO: 12655 - RNA, 21 nt, synthetic construct
  source 1..21: mol_type = other RNA
tggagtgcactggcgccatga

SEQ ID NO: 12656 - RNA, 21 nt, synthetic construct
  source 1..21: mol_type = other RNA
tggagtgggggacgggtaggc

SEQ ID NO: 12657 - RNA, 21 nt, synthetic construct
  source 1..21: mol_type = other RNA
tggatctcggggaagcggcgg

SEQ ID NO: 12658 - RNA, 21 nt, synthetic construct
  source 1..21: mol_type = other RNA
tggcacacagaaagatgtcaa

SEQ ID NO: 12659 - RNA, 21 nt, synthetic construct
  source 1..21: mol_type = other RNA
tggcagcaatcgagattgaag

SEQ ID NO: 12660 - RNA, 21 nt, synthetic construct
  source 1..21: mol_type = other RNA
tggccaggctggtctcaacta

SEQ ID NO: 12661 - RNA, 21 nt, synthetic construct
  source 1..21: mol_type = other RNA
tggccccacatagacccagag

SEQ ID NO: 12662 - RNA, 21 nt, synthetic construct
  source 1..21: mol_type = other RNA
tggcccgccgtggggctagtc

SEQ ID NO: 12663 - RNA, 21 nt, synthetic construct
  source 1..21: mol_type = other RNA
tggccctcgctgtgctctctc

SEQ ID NO: 12664 - RNA, 21 nt, synthetic construct
  source 1..21: mol_type = other RNA
tggcctacggcgacgggaggg

SEQ ID NO: 12665 - RNA, 21 nt, synthetic construct
  source 1..21: mol_type = other RNA
tggcctgggagtggggaaggg

SEQ ID NO: 12666 - RNA, 21 nt, synthetic construct
  source 1..21: mol_type = other RNA
tggcgccagtgcactccagcg

SEQ ID NO: 12667 - RNA, 21 nt, synthetic construct
  source 1..21: mol_type = other RNA
tggcgccatgatagctcaaaa

SEQ ID NO: 12668 - RNA, 21 nt, synthetic construct
  source 1..21: mol_type = other RNA
tggcggaagataactgttttc

SEQ ID NO: 12669 - RNA, 21 nt, synthetic construct
  source 1..21: mol_type = other RNA
tggctcccccagcgcagctgg

SEQ ID NO: 12670 - RNA, 21 nt, synthetic construct
  source 1..21: mol_type = other RNA
tggctcgtgcctgtggtccca

SEQ ID NO: 12671 - RNA, 21 nt, synthetic construct
  source 1..21: mol_type = other RNA
tggctctttgcctggttgttt

SEQ ID NO: 12672 - RNA, 21 nt, synthetic construct
  source 1..21: mol_type = other RNA
tggctgaggcgggaggatctc

SEQ ID NO: 12673 - RNA, 21 nt, synthetic construct
  source 1..21: mol_type = other RNA
tggctgtaattcgtgcatttt

SEQ ID NO: 12674 - RNA, 21 nt, synthetic construct
  source 1..21: mol_type = other RNA
tggctgtgatacaaagcggtt

SEQ ID NO: 12675 - RNA, 21 nt, synthetic construct
  source 1..21: mol_type = other RNA
tggcttgaggtccgtagttga

SEQ ID NO: 12676 - RNA, 21 nt, synthetic construct
  source 1..21: mol_type = other RNA
tgggacgagcctacccgtccc

SEQ ID NO: 12677 - RNA, 21 nt, synthetic construct
  source 1..21: mol_type = other RNA
tgggagtggggaagggggtgc

SEQ ID NO: 12678 - RNA, 21 nt, synthetic construct
  source 1..21: mol_type = other RNA
tgggccctgtggtcttttcgt

SEQ ID NO: 12679 - RNA, 21 nt, synthetic construct
  source 1..21: mol_type = other RNA
tgggcggcatgggccctgtgg

SEQ ID NO: 12680 - RNA, 21 nt, synthetic construct
  source 1..21: mol_type = other RNA
tggggaagggggtgcgcaccc

SEQ ID NO: 12681 - RNA, 21 nt, synthetic construct
  source 1..21: mol_type = other RNA
tggggaggaaacagcacgcga

SEQ ID NO: 12682 - RNA, 21 nt, synthetic construct
  source 1..21: mol_type = other RNA
tggggccacaccgtggggagg

SEQ ID NO: 12683 - RNA, 21 nt, synthetic construct
  source 1..21: mol_type = other RNA
tggggctagtccagggctgga

SEQ ID NO: 12684 - RNA, 21 nt, synthetic construct
  source 1..21: mol_type = other RNA
tgggggacgggtaggctcgtc

SEQ ID NO: 12685 - RNA, 21 nt, synthetic construct
  source 1..21: mol_type = other RNA
tgggggagggtttctcttccg

SEQ ID NO: 12686 - RNA, 21 nt, synthetic construct
  source 1..21: mol_type = other RNA
tggggtctgggggaggcgtcg

SEQ ID NO: 12687 - RNA, 21 nt, synthetic construct
  source 1..21: mol_type = other RNA
tgggtctatgtggggccacac

SEQ ID NO: 12688 - RNA, 21 nt, synthetic construct
  source 1..21: mol_type = other RNA
tggtcccagctgctccggtgg

SEQ ID NO: 12689 - RNA, 21 nt, synthetic construct
  source 1..21: mol_type = other RNA
tggtccttcctctcccgctct

SEQ ID NO: 12690 - RNA, 21 nt, synthetic construct
  source 1..21: mol_type = other RNA
tggtctcaactacggacctca

SEQ ID NO: 12691 - RNA, 21 nt, synthetic construct
  source 1..21: mol_type = other RNA
tggtcttttcgtacagagggc

SEQ ID NO: 12692 - RNA, 21 nt, synthetic construct
  source 1..21: mol_type = other RNA
tggtgaagcctggtctctaca

SEQ ID NO: 12693 - RNA, 21 nt, synthetic construct
  source 1..21: mol_type = other RNA
tggtggcccgccgtggggcta

SEQ ID NO: 12694 - RNA, 21 nt, synthetic construct
  source 1..21: mol_type = other RNA
tggtggctcgtgcctgtggtc

SEQ ID NO: 12695 - RNA, 21 nt, synthetic construct
  source 1..21: mol_type = other RNA
tggttaggcttgacttcaatc

SEQ ID NO: 12696 - RNA, 21 nt, synthetic construct
  source 1..21: mol_type = other RNA
tggttatcttctgcctctcac

SEQ ID NO: 12697 - RNA, 21 nt, synthetic construct
  source 1..21: mol_type = other RNA
tggttgtttccaagatgtact

SEQ ID NO: 12698 - RNA, 21 nt, synthetic construct
  source 1..21: mol_type = other RNA
tgtacgaaaagaccacagggc

SEQ ID NO: 12699 - RNA, 21 nt, synthetic construct
  source 1..21: mol_type = other RNA
tgtactgtgcctcttactttc

SEQ ID NO: 12700 - RNA, 21 nt, synthetic construct
  source 1..21: mol_type = other RNA
tgtagaatgcttggctgtgat

SEQ ID NO: 12701 - RNA, 21 nt, synthetic construct
  source 1..21: mol_type = other RNA
tgtagagaccaggcttcacca

SEQ ID NO: 12702 - RNA, 21 nt, synthetic construct
  source 1..21: mol_type = other RNA
tgtatcacagccaagcattct

SEQ ID NO: 12703 - RNA, 21 nt, synthetic construct
  source 1..21: mol_type = other RNA
tgtcaataacgggtagttctt

SEQ ID NO: 12704 - RNA, 21 nt, synthetic construct
  source 1..21: mol_type = other RNA
tgtcccgaccctcccgtcgcc

SEQ ID NO: 12705 - RNA, 21 nt, synthetic construct
  source 1..21: mol_type = other RNA
tgtcctagcacctctgggtct

SEQ ID NO: 12706 - RNA, 21 nt, synthetic construct
  source 1..21: mol_type = other RNA
tgtctgctgcggctctgcttc

SEQ ID NO: 12707 - RNA, 21 nt, synthetic construct
  source 1..21: mol_type = other RNA
tgtgaacgcgtggaggggcgc

SEQ ID NO: 12708 - RNA, 21 nt, synthetic construct
  source 1..21: mol_type = other RNA
tgtgagaggcagaagataacc

SEQ ID NO: 12709 - RNA, 21 nt, synthetic construct
  source 1..21: mol_type = other RNA
tgtgatacaaagcggtttcga

SEQ ID NO: 12710 - RNA, 21 nt, synthetic construct
  source 1..21: mol_type = other RNA
tgtgatgggaacaaataagtt

SEQ ID NO: 12711 - RNA, 21 nt, synthetic construct
  source 1..21: mol_type = other RNA
tgtgccaaggactttatgtgc

SEQ ID NO: 12712 - RNA, 21 nt, synthetic construct
  source 1..21: mol_type = other RNA
tgtgcctcttactttcggttt

SEQ ID NO: 12713 - RNA, 21 nt, synthetic construct
  source 1..21: mol_type = other RNA
tgtgctctctcgctccgtgac

SEQ ID NO: 12714 - RNA, 21 nt, synthetic construct
  source 1..21: mol_type = other RNA
tgtgctttgcgtcatttaatt

SEQ ID NO: 12715 - RNA, 21 nt, synthetic construct
  source 1..21: mol_type = other RNA
tgtggacttcgtctaggcgcc

SEQ ID NO: 12716 - RNA, 21 nt, synthetic construct
  source 1..21: mol_type = other RNA
tgtggccccacatagacccag

SEQ ID NO: 12717 - RNA, 21 nt, synthetic construct
  source 1..21: mol_type = other RNA
tgtggccctcgctgtgctctc

SEQ ID NO: 12718 - RNA, 21 nt, synthetic construct
  source 1..21: mol_type = other RNA
tgtggggccacaccgtgggga

SEQ ID NO: 12719 - RNA, 21 nt, synthetic construct
  source 1..21: mol_type = other RNA
tgtggtcccagctgctccggt

SEQ ID NO: 12720 - RNA, 21 nt, synthetic construct
  source 1..21: mol_type = other RNA
tgtggtcttttcgtacagagg

SEQ ID NO: 12721 - RNA, 21 nt, synthetic construct
  source 1..21: mol_type = other RNA
tgtgtgccaaggactttatgt

SEQ ID NO: 12722 - RNA, 21 nt, synthetic construct
  source 1..21: mol_type = other RNA
tgttcccatcacatgtcactt

SEQ ID NO: 12723 - RNA, 21 nt, synthetic construct
  source 1..21: mol_type = other RNA
tgttgcccacgctggagtgca

SEQ ID NO: 12724 - RNA, 21 nt, synthetic construct
  source 1..21: mol_type = other RNA
tgttggccaggctggtctcaa

SEQ ID NO: 12725 - RNA, 21 nt, synthetic construct
  source 1..21: mol_type = other RNA
tgtttccaagatgtactgtgc

SEQ ID NO: 12726 - RNA, 21 nt, synthetic construct
  source 1..21: mol_type = other RNA
tgtttcctccccacggtgtgg

SEQ ID NO: 12727 - RNA, 21 nt, synthetic construct
  source 1..21: mol_type = other RNA
tgttttcaaaaccgaaagtaa

SEQ ID NO: 12728 - RNA, 21 nt, synthetic construct
  source 1..21: mol_type = other RNA
ttaaaagtgacatgtgatggg

SEQ ID NO: 12729 - RNA, 21 nt, synthetic construct
  source 1..21: mol_type = other RNA
ttaaaatctcggtgccttagt

SEQ ID NO: 12730 - RNA, 21 nt, synthetic construct
  source 1..21: mol_type = other RNA
ttaaatgacgcaaagcacata

SEQ ID NO: 12731 - RNA, 21 nt, synthetic construct
  source 1..21: mol_type = other RNA
ttaacttatttgttcccatca

SEQ ID NO: 12732 - RNA, 21 nt, synthetic construct
  source 1..21: mol_type = other RNA
ttaagaaaaacgcctgccttc

SEQ ID NO: 12733 - RNA, 21 nt, synthetic construct
  source 1..21: mol_type = other RNA
ttaagtttcttaaaatctcgg

SEQ ID NO: 12734 - RNA, 21 nt, synthetic construct
  source 1..21: mol_type = other RNA
ttaattacacaggggataaat

SEQ ID NO: 12735 - RNA, 21 nt, synthetic construct
  source 1..21: mol_type = other RNA
ttaattattcgaaaccgcttt

SEQ ID NO: 12736 - RNA, 21 nt, synthetic construct
  source 1..21: mol_type = other RNA
ttacacaggggataaatggca

SEQ ID NO: 12737 - RNA, 21 nt, synthetic construct
  source 1..21: mol_type = other RNA
ttacagccaaaaggcatgcgc

SEQ ID NO: 12738 - RNA, 21 nt, synthetic construct
  source 1..21: mol_type = other RNA
ttacaggcgtaagctaccacg

SEQ ID NO: 12739 - RNA, 21 nt, synthetic construct
  source 1..21: mol_type = other RNA
ttacccgggcgacgcctcccc

SEQ ID NO: 12740 - RNA, 21 nt, synthetic construct
  source 1..21: mol_type = other RNA
ttactttcggttttgaaaaca

SEQ ID NO: 12741 - RNA, 21 nt, synthetic construct
  source 1..21: mol_type = other RNA
ttagactggagagctgtggac

SEQ ID NO: 12742 - RNA, 21 nt, synthetic construct
  source 1..21: mol_type = other RNA
ttagccgggtgtggtggctcg

SEQ ID NO: 12743 - RNA, 21 nt, synthetic construct
  source 1..21: mol_type = other RNA
ttagcgggcgcctagacgaag

SEQ ID NO: 12744 - RNA, 21 nt, synthetic construct
  source 1..21: mol_type = other RNA
ttaggcttgacttcaatctcg

SEQ ID NO: 12745 - RNA, 21 nt, synthetic construct
  source 1..21: mol_type = other RNA
ttaggcttttgagctatcatg

SEQ ID NO: 12746 - RNA, 21 nt, synthetic construct
  source 1..21: mol_type = other RNA
ttagggaggccgaggcgggag

SEQ ID NO: 12747 - RNA, 21 nt, synthetic construct
  source 1..21: mol_type = other RNA
ttagggcgtcgataagcgtca

SEQ ID NO: 12748 - RNA, 21 nt, synthetic construct
  source 1..21: mol_type = other RNA
ttagtttcttcatctgtgaga

SEQ ID NO: 12749 - RNA, 21 nt, synthetic construct
  source 1..21: mol_type = other RNA
ttataagaactacccgttatt

SEQ ID NO: 12750 - RNA, 21 nt, synthetic construct
  source 1..21: mol_type = other RNA
ttatcccctgtgtaattaagt

SEQ ID NO: 12751 - RNA, 21 nt, synthetic construct
  source 1..21: mol_type = other RNA
ttatcgacgccctaaactttg

SEQ ID NO: 12752 - RNA, 21 nt, synthetic construct
  source 1..21: mol_type = other RNA
ttatctatggcggaagataac

SEQ ID NO: 12753 - RNA, 21 nt, synthetic construct
  source 1..21: mol_type = other RNA
ttatcttccgccatagataac

SEQ ID NO: 12754 - RNA, 21 nt, synthetic construct
  source 1..21: mol_type = other RNA
ttatcttctgcctctcacaga

SEQ ID NO: 12755 - RNA, 21 nt, synthetic construct
  source 1..21: mol_type = other RNA
ttatgtgctttgcgtcattta

SEQ ID NO: 12756 - RNA, 21 nt, synthetic construct
  source 1..21: mol_type = other RNA
ttattcgaaaccgctttgtat

SEQ ID NO: 12757 - RNA, 21 nt, synthetic construct
  source 1..21: mol_type = other RNA
ttattgacatctttctgtgtg

SEQ ID NO: 12758 - RNA, 21 nt, synthetic construct
  source 1..21: mol_type = other RNA
ttatttgttcccatcacatgt

SEQ ID NO: 12759 - RNA, 21 nt, synthetic construct
  source 1..21: mol_type = other RNA
ttattttttgtagagaccagg

SEQ ID NO: 12760 - RNA, 21 nt, synthetic construct
  source 1..21: mol_type = other RNA
ttcaaaaccgaaagtaagagg

SEQ ID NO: 12761 - RNA, 21 nt, synthetic construct
  source 1..21: mol_type = other RNA
ttcaatctcgattgctgccat

SEQ ID NO: 12762 - RNA, 21 nt, synthetic construct
  source 1..21: mol_type = other RNA
ttcacaaacctcagcgccgcg

SEQ ID NO: 12763 - RNA, 21 nt, synthetic construct
  source 1..21: mol_type = other RNA
ttcatctgtgagaggcagaag

SEQ ID NO: 12764 - RNA, 21 nt, synthetic construct
  source 1..21: mol_type = other RNA
ttccaagatgtactgtgcctc

SEQ ID NO: 12765 - RNA, 21 nt, synthetic construct
  source 1..21: mol_type = other RNA
ttcccatcacatgtcactttt

SEQ ID NO: 12766 - RNA, 21 nt, synthetic construct
  source 1..21: mol_type = other RNA
ttccccactcccaggccaccc

SEQ ID NO: 12767 - RNA, 21 nt, synthetic construct
  source 1..21: mol_type = other RNA
ttccccgagatccagccctgg

SEQ ID NO: 12768 - RNA, 21 nt, synthetic construct
  source 1..21: mol_type = other RNA
ttcccttagactggagagctg

SEQ ID NO: 12769 - RNA, 21 nt, synthetic construct
  source 1..21: mol_type = other RNA
ttcccttctccaagttctcct

SEQ ID NO: 12770 - RNA, 21 nt, synthetic construct
  source 1..21: mol_type = other RNA
ttccgccatagataactacta

SEQ ID NO: 12771 - RNA, 21 nt, synthetic construct
  source 1..21: mol_type = other RNA
ttccgctctttcgcggggcct

SEQ ID NO: 12772 - RNA, 21 nt, synthetic construct
  source 1..21: mol_type = other RNA
ttcctccccacggtgtggccc

SEQ ID NO: 12773 - RNA, 21 nt, synthetic construct
  source 1..21: mol_type = other RNA
ttcctctcccgctctgcaccc

SEQ ID NO: 12774 - RNA, 21 nt, synthetic construct
  source 1..21: mol_type = other RNA
ttcctctttggctctttgcct

SEQ ID NO: 12775 - RNA, 21 nt, synthetic construct
  source 1..21: mol_type = other RNA
ttcgaaaccgctttgtatcac

SEQ ID NO: 12776 - RNA, 21 nt, synthetic construct
  source 1..21: mol_type = other RNA
ttcgcatgtcctagcacctct

SEQ ID NO: 12777 - RNA, 21 nt, synthetic construct
  source 1..21: mol_type = other RNA
ttcgcggggcctctggctccc

SEQ ID NO: 12778 - RNA, 21 nt, synthetic construct
  source 1..21: mol_type = other RNA
ttcggcggggagcaggggaga

SEQ ID NO: 12779 - RNA, 21 nt, synthetic construct
  source 1..21: mol_type = other RNA
ttcggttttgaaaacatgagg

SEQ ID NO: 12780 - RNA, 21 nt, synthetic construct
  source 1..21: mol_type = other RNA
ttcgtacagagggcttcctct

SEQ ID NO: 12781 - RNA, 21 nt, synthetic construct
  source 1..21: mol_type = other RNA
ttcgtctaggcgcccgctaag

SEQ ID NO: 12782 - RNA, 21 nt, synthetic construct
  source 1..21: mol_type = other RNA
ttctacaaacgtcgcgtgctg

SEQ ID NO: 12783 - RNA, 21 nt, synthetic construct
  source 1..21: mol_type = other RNA
ttctccaagttctccttggtg

SEQ ID NO: 12784 - RNA, 21 nt, synthetic construct
  source 1..21: mol_type = other RNA
ttctccagagcaaactgggcg

SEQ ID NO: 12785 - RNA, 21 nt, synthetic construct
  source 1..21: mol_type = other RNA
ttctccttggtggcccgccgt

SEQ ID NO: 12786 - RNA, 21 nt, synthetic construct
  source 1..21: mol_type = other RNA
ttctcttccgctctttcgcgg

SEQ ID NO: 12787 - RNA, 21 nt, synthetic construct
  source 1..21: mol_type = other RNA
ttctgcctctcacagatgaag

SEQ ID NO: 12788 - RNA, 21 nt, synthetic construct
  source 1..21: mol_type = other RNA
ttctgcgtgagattctccaga

SEQ ID NO: 12789 - RNA, 21 nt, synthetic construct
  source 1..21: mol_type = other RNA
ttctgtgtgccaaggacttta

SEQ ID NO: 12790 - RNA, 21 nt, synthetic construct
  source 1..21: mol_type = other RNA
ttcttaaaatctcggtgcctt

SEQ ID NO: 12791 - RNA, 21 nt, synthetic construct
  source 1..21: mol_type = other RNA
ttcttcatctgtgagaggcag

SEQ ID NO: 12792 - RNA, 21 nt, synthetic construct
  source 1..21: mol_type = other RNA
ttgaaaacagttatcttccgc

SEQ ID NO: 12793 - RNA, 21 nt, synthetic construct
  source 1..21: mol_type = other RNA
ttgaaaacatgagggggttgg

SEQ ID NO: 12794 - RNA, 21 nt, synthetic construct
  source 1..21: mol_type = other RNA
ttgaagtcaagcctaaccagg

SEQ ID NO: 12795 - RNA, 21 nt, synthetic construct
  source 1..21: mol_type = other RNA
ttgacatctttctgtgtgcca

SEQ ID NO: 12796 - RNA, 21 nt, synthetic construct
  source 1..21: mol_type = other RNA
ttgacttcaatctcgattgct

SEQ ID NO: 12797 - RNA, 21 nt, synthetic construct
  source 1..21: mol_type = other RNA
ttgagctatcatggcgccagt

SEQ ID NO: 12798 - RNA, 21 nt, synthetic construct
  source 1..21: mol_type = other RNA
ttgagcttaggcttttgagct

SEQ ID NO: 12799 - RNA, 21 nt, synthetic construct
  source 1..21: mol_type = other RNA
ttgaggtccgtagttgagacc

SEQ ID NO: 12800 - RNA, 21 nt, synthetic construct
  source 1..21: mol_type = other RNA
ttgcccacgctggagtgcact

SEQ ID NO: 12801 - RNA, 21 nt, synthetic construct
  source 1..21: mol_type = other RNA
ttgcccctttcggcggggagc

SEQ ID NO: 12802 - RNA, 21 nt, synthetic construct
  source 1..21: mol_type = other RNA
ttgcctggttgtttccaagat

SEQ ID NO: 12803 - RNA, 21 nt, synthetic construct
  source 1..21: mol_type = other RNA
ttgcgggagcgcatgcctttt

SEQ ID NO: 12804 - RNA, 21 nt, synthetic construct
  source 1..21: mol_type = other RNA
ttgctctggagaatctcacgc

SEQ ID NO: 12805 - RNA, 21 nt, synthetic construct
  source 1..21: mol_type = other RNA
ttgctgccatttatcccctgt

SEQ ID NO: 12806 - RNA, 21 nt, synthetic construct
  source 1..21: mol_type = other RNA
ttggaaacaaccaggcaaaga

SEQ ID NO: 12807 - RNA, 21 nt, synthetic construct
  source 1..21: mol_type = other RNA
ttggagaagggaagtcacgga

SEQ ID NO: 12808 - RNA, 21 nt, synthetic construct
  source 1..21: mol_type = other RNA
ttggcacacagaaagatgtca

SEQ ID NO: 12809 - RNA, 21 nt, synthetic construct
  source 1..21: mol_type = other RNA
ttggccaggctggtctcaact

SEQ ID NO: 12810 - RNA, 21 nt, synthetic construct
  source 1..21: mol_type = other RNA
ttggcctacggcgacgggagg

SEQ ID NO: 12811 - RNA, 21 nt, synthetic construct
  source 1..21: mol_type = other RNA
ttggctctttgcctggttgtt

SEQ ID NO: 12812 - RNA, 21 nt, synthetic construct
  source 1..21: mol_type = other RNA
ttggctgtaattcgtgcattt

SEQ ID NO: 12813 - RNA, 21 nt, synthetic construct
  source 1..21: mol_type = other RNA
ttggctgtgatacaaagcggt

SEQ ID NO: 12814 - RNA, 21 nt, synthetic construct
  source 1..21: mol_type = other RNA
ttgggacgagcctacccgtcc

SEQ ID NO: 12815 - RNA, 21 nt, synthetic construct
  source 1..21: mol_type = other RNA
ttgggcgtggtagcttacgcc

SEQ ID NO: 12816 - RNA, 21 nt, synthetic construct
  source 1..21: mol_type = other RNA
ttgggggagggtttctcttcc

SEQ ID NO: 12817 - RNA, 21 nt, synthetic construct
  source 1..21: mol_type = other RNA
ttggggtctgggggaggcgtc

SEQ ID NO: 12818 - RNA, 21 nt, synthetic construct
  source 1..21: mol_type = other RNA
ttggtggcccgccgtggggct

SEQ ID NO: 12819 - RNA, 21 nt, synthetic construct
  source 1..21: mol_type = other RNA
ttgtagaatgcttggctgtga

SEQ ID NO: 12820 - RNA, 21 nt, synthetic construct
  source 1..21: mol_type = other RNA
ttgtagagaccaggcttcacc

SEQ ID NO: 12821 - RNA, 21 nt, synthetic construct
  source 1..21: mol_type = other RNA
ttgtatcacagccaagcattc

SEQ ID NO: 12822 - RNA, 21 nt, synthetic construct
  source 1..21: mol_type = other RNA
ttgtcccgaccctcccgtcgc

SEQ ID NO: 12823 - RNA, 21 nt, synthetic construct
  source 1..21: mol_type = other RNA
ttgtgaacgcgtggaggggcg

SEQ ID NO: 12824 - RNA, 21 nt, synthetic construct
  source 1..21: mol_type = other RNA
ttgttcccatcacatgtcact

SEQ ID NO: 12825 - RNA, 21 nt, synthetic construct
  source 1..21: mol_type = other RNA
ttgtttccaagatgtactgtg

SEQ ID NO: 12826 - RNA, 21 nt, synthetic construct
  source 1..21: mol_type = other RNA
tttaaaagtgacatgtgatgg

SEQ ID NO: 12827 - RNA, 21 nt, synthetic construct
  source 1..21: mol_type = other RNA
tttaagaaaaacgcctgcctt

SEQ ID NO: 12828 - RNA, 21 nt, synthetic construct
  source 1..21: mol_type = other RNA
tttagggcgtcgataagcgtc

SEQ ID NO: 12829 - RNA, 21 nt, synthetic construct
  source 1..21: mol_type = other RNA
tttatcccctgtgtaattaag

SEQ ID NO: 12830 - RNA, 21 nt, synthetic construct
  source 1..21: mol_type = other RNA
tttatgtgctttgcgtcattt

SEQ ID NO: 12831 - RNA, 21 nt, synthetic construct
  source 1..21: mol_type = other RNA
tttcaaaaccgaaagtaagag

SEQ ID NO: 12832 - RNA, 21 nt, synthetic construct
  source 1..21: mol_type = other RNA
tttccaagatgtactgtgcct

SEQ ID NO: 12833 - RNA, 21 nt, synthetic construct
  source 1..21: mol_type = other RNA
tttcctccccacggtgtggcc

SEQ ID NO: 12834 - RNA, 21 nt, synthetic construct
  source 1..21: mol_type = other RNA
tttcgcggggcctctggctcc

SEQ ID NO: 12835 - RNA, 21 nt, synthetic construct
  source 1..21: mol_type = other RNA
tttcggcggggagcaggggag

SEQ ID NO: 12836 - RNA, 21 nt, synthetic construct
  source 1..21: mol_type = other RNA
tttcggttttgaaaacatgag

SEQ ID NO: 12837 - RNA, 21 nt, synthetic construct
  source 1..21: mol_type = other RNA
tttcgtacagagggcttcctc

SEQ ID NO: 12838 - RNA, 21 nt, synthetic construct
  source 1..21: mol_type = other RNA
tttctcttccgctctttcgcg

SEQ ID NO: 12839 - RNA, 21 nt, synthetic construct
  source 1..21: mol_type = other RNA
tttctgtgtgccaaggacttt

SEQ ID NO: 12840 - RNA, 21 nt, synthetic construct
  source 1..21: mol_type = other RNA
tttcttaaaatctcggtgcct

SEQ ID NO: 12841 - RNA, 21 nt, synthetic construct
  source 1..21: mol_type = other RNA
tttcttcatctgtgagaggca

SEQ ID NO: 12842 - RNA, 21 nt, synthetic construct
  source 1..21: mol_type = other RNA
tttgaaaacagttatcttccg

SEQ ID NO: 12843 - RNA, 21 nt, synthetic construct
  source 1..21: mol_type = other RNA
tttgaaaacatgagggggttg

SEQ ID NO: 12844 - RNA, 21 nt, synthetic construct
  source 1..21: mol_type = other RNA
tttgagctatcatggcgccag

SEQ ID NO: 12845 - RNA, 21 nt, synthetic construct
  source 1..21: mol_type = other RNA
tttgcctggttgtttccaaga

SEQ ID NO: 12846 - RNA, 21 nt, synthetic construct
  source 1..21: mol_type = other RNA
tttgcgggagcgcatgccttt

SEQ ID NO: 12847 - RNA, 21 nt, synthetic construct
  source 1..21: mol_type = other RNA
tttgctctggagaatctcacg

SEQ ID NO: 12848 - RNA, 21 nt, synthetic construct
  source 1..21: mol_type = other RNA
tttggcctacggcgacgggag

SEQ ID NO: 12849 - RNA, 21 nt, synthetic construct
  source 1..21: mol_type = other RNA
tttggctctttgcctggttgt

SEQ ID NO: 12850 - RNA, 21 nt, synthetic construct
  source 1..21: mol_type = other RNA
tttggctgtaattcgtgcatt

SEQ ID NO: 12851 - RNA, 21 nt, synthetic construct
  source 1..21: mol_type = other RNA
tttgggacgagcctacccgtc

SEQ ID NO: 12852 - RNA, 21 nt, synthetic construct
  source 1..21: mol_type = other RNA
tttgtagaatgcttggctgtg

SEQ ID NO: 12853 - RNA, 21 nt, synthetic construct
  source 1..21: mol_type = other RNA
tttgtagagaccaggcttcac

SEQ ID NO: 12854 - RNA, 21 nt, synthetic construct
  source 1..21: mol_type = other RNA
tttgtatcacagccaagcatt

SEQ ID NO: 12855 - RNA, 21 nt, synthetic construct
  source 1..21: mol_type = other RNA
tttgtcccgaccctcccgtcg

SEQ ID NO: 12856 - RNA, 21 nt, synthetic construct
  source 1..21: mol_type = other RNA
tttgtgaacgcgtggaggggc

SEQ ID NO: 12857 - RNA, 21 nt, synthetic construct
  source 1..21: mol_type = other RNA
tttgttcccatcacatgtcac

SEQ ID NO: 12858 - RNA, 21 nt, synthetic construct
  source 1..21: mol_type = other RNA
ttttaaaagtgacatgtgatg

SEQ ID NO: 12859 - RNA, 21 nt, synthetic construct
  source 1..21: mol_type = other RNA
ttttaagaaaaacgcctgcct

SEQ ID NO: 12860 - RNA, 21 nt, synthetic construct
  source 1..21: mol_type = other RNA
ttttcaaaaccgaaagtaaga

SEQ ID NO: 12861 - RNA, 21 nt, synthetic construct
  source 1..21: mol_type = other RNA
ttttcgtacagagggcttcct

SEQ ID NO: 12862 - RNA, 21 nt, synthetic construct
  source 1..21: mol_type = other RNA
ttttgaaaacagttatcttcc

SEQ ID NO: 12863 - RNA, 21 nt, synthetic construct
  source 1..21: mol_type = other RNA
ttttgaaaacatgagggggtt

SEQ ID NO: 12864 - RNA, 21 nt, synthetic construct
  source 1..21: mol_type = other RNA
ttttgagctatcatggcgcca

SEQ ID NO: 12865 - RNA, 21 nt, synthetic construct
  source 1..21: mol_type = other RNA
ttttgcgggagcgcatgcctt

SEQ ID NO: 12866 - RNA, 21 nt, synthetic construct
  source 1..21: mol_type = other RNA
ttttggctgtaattcgtgcat

SEQ ID NO: 12867 - RNA, 21 nt, synthetic construct
  source 1..21: mol_type = other RNA
ttttgtagagaccaggcttca

SEQ ID NO: 12868 - RNA, 21 nt, synthetic construct
  source 1..21: mol_type = other RNA
tttttaagaaaaacgcctgcc

SEQ ID NO: 12869 - RNA, 21 nt, synthetic construct
  source 1..21: mol_type = other RNA
tttttgtagagaccaggcttc

SEQ ID NO: 12870 - RNA, 21 nt, synthetic construct
  source 1..21: mol_type = other RNA
ttttttaagaaaaacgcctgc

SEQ ID NO: 12871 - RNA, 21 nt, synthetic construct
  source 1..21: mol_type = other RNA
ttttttgtagagaccaggctt

SEQ ID NO: 12872 - RNA, 22 nt, synthetic construct
  source 1..22: mol_type = other RNA
aaaaaatgcacgaattacagcc

SEQ ID NO: 12873 - RNA, 22 nt, synthetic construct
  source 1..22: mol_type = other RNA
aaaaaattataagaactacccg

SEQ ID NO: 12874 - RNA, 22 nt, synthetic construct
  source 1..22: mol_type = other RNA
aaaaacgcctgccttctgcgtg

SEQ ID NO: 12875 - RNA, 22 nt, synthetic construct
  source 1..22: mol_type = other RNA
aaaaatgcacgaattacagcca

SEQ ID NO: 12876 - RNA, 22 nt, synthetic construct
  source 1..22: mol_type = other RNA
aaaaattataagaactacccgt

SEQ ID NO: 12877 - RNA, 22 nt, synthetic construct
  source 1..22: mol_type = other RNA
aaaacagttatcttccgccata

SEQ ID NO: 12878 - RNA, 22 nt, synthetic construct
  source 1..22: mol_type = other RNA
aaaacatgagggggttgggcgt

SEQ ID NO: 12879 - RNA, 22 nt, synthetic construct
  source 1..22: mol_type = other RNA
aaaaccgaaagtaagaggcaca

SEQ ID NO: 12880 - RNA, 22 nt, synthetic construct
  source 1..22: mol_type = other RNA
aaaacgcctgccttctgcgtga

SEQ ID NO: 12881 - RNA, 22 nt, synthetic construct
  source 1..22: mol_type = other RNA
aaaagaccacagggcccatgcc

SEQ ID NO: 12882 - RNA, 22 nt, synthetic construct
  source 1..22: mol_type = other RNA
aaaagccctggttaggcttgac

SEQ ID NO: 12883 - RNA, 22 nt, synthetic construct
  source 1..22: mol_type = other RNA
aaaagcctaagctcaagagatc

SEQ ID NO: 12884 - RNA, 22 nt, synthetic construct
  source 1..22: mol_type = other RNA
aaaaggcatgcgctcccgcaaa

SEQ ID NO: 12885 - RNA, 22 nt, synthetic construct
  source 1..22: mol_type = other RNA
aaaagtgacatgtgatgggaac

SEQ ID NO: 12886 - RNA, 22 nt, synthetic construct
  source 1..22: mol_type = other RNA
aaaatctcggtgccttagtttc

SEQ ID NO: 12887 - RNA, 22 nt, synthetic construct
  source 1..22: mol_type = other RNA
aaaatgcacgaattacagccaa

SEQ ID NO: 12888 - RNA, 22 nt, synthetic construct
  source 1..22: mol_type = other RNA
aaaattaaatgacgcaaagcac

SEQ ID NO: 12889 - RNA, 22 nt, synthetic construct
  source 1..22: mol_type = other RNA
aaaattataagaactacccgtt

SEQ ID NO: 12890 - RNA, 22 nt, synthetic construct
  source 1..22: mol_type = other RNA
aaacaaccaggcaaagagccaa

SEQ ID NO: 12891 - RNA, 22 nt, synthetic construct
  source 1..22: mol_type = other RNA
aaacagcacgcgacgtttgtag

SEQ ID NO: 12892 - RNA, 22 nt, synthetic construct
  source 1..22: mol_type = other RNA
aaacagttatcttccgccatag

SEQ ID NO: 12893 - RNA, 22 nt, synthetic construct
  source 1..22: mol_type = other RNA
aaacatgagggggttgggcgtg

SEQ ID NO: 12894 - RNA, 22 nt, synthetic construct
  source 1..22: mol_type = other RNA
aaaccctcccccaacctcggcg

SEQ ID NO: 12895 - RNA, 22 nt, synthetic construct
  source 1..22: mol_type = other RNA
aaaccgaaagtaagaggcacag

SEQ ID NO: 12896 - RNA, 22 nt, synthetic construct
  source 1..22: mol_type = other RNA
aaaccgctttgtatcacagcca

SEQ ID NO: 12897 - RNA, 22 nt, synthetic construct
  source 1..22: mol_type = other RNA
aaacctcagcgccgcgcctttg

SEQ ID NO: 12898 - RNA, 22 nt, synthetic construct
  source 1..22: mol_type = other RNA
aaacgcctgccttctgcgtgag

SEQ ID NO: 12899 - RNA, 22 nt, synthetic construct
  source 1..22: mol_type = other RNA
aaacgtcgcgtgctgtttcctc

SEQ ID NO: 12900 - RNA, 22 nt, synthetic construct
  source 1..22: mol_type = other RNA
aaactaaggcaccgagatttta

SEQ ID NO: 12901 - RNA, 22 nt, synthetic construct
  source 1..22: mol_type = other RNA
aaactgggcggcatgggccctg

SEQ ID NO: 12902 - RNA, 22 nt, synthetic construct
  source 1..22: mol_type = other RNA
aaacttaattacacaggggata

SEQ ID NO: 12903 - RNA, 22 nt, synthetic construct
  source 1..22: mol_type = other RNA
aaactttgtcccgaccctcccg

SEQ ID NO: 12904 - RNA, 22 nt, synthetic construct
  source 1..22: mol_type = other RNA
aaagaccacagggcccatgccg

SEQ ID NO: 12905 - RNA, 22 nt, synthetic construct
  source 1..22: mol_type = other RNA
aaagagccaaagaggaagccct

SEQ ID NO: 12906 - RNA, 22 nt, synthetic construct
  source 1..22: mol_type = other RNA
aaagagcggaagagaaaccctc

SEQ ID NO: 12907 - RNA, 22 nt, synthetic construct
  source 1..22: mol_type = other RNA
aaagaggaagccctctgtacga

SEQ ID NO: 12908 - RNA, 22 nt, synthetic construct
  source 1..22: mol_type = other RNA
aaagatgtcaataacgggtagt

SEQ ID NO: 12909 - RNA, 22 nt, synthetic construct
  source 1..22: mol_type = other RNA
aaagcacataaagtccttggca

SEQ ID NO: 12910 - RNA, 22 nt, synthetic construct
  source 1..22: mol_type = other RNA
aaagccctggttaggcttgact

SEQ ID NO: 12911 - RNA, 22 nt, synthetic construct
  source 1..22: mol_type = other RNA
aaagcctaagctcaagagatcc

SEQ ID NO: 12912 - RNA, 22 nt, synthetic construct
  source 1..22: mol_type = other RNA
aaagcggtttcgaataattaac

SEQ ID NO: 12913 - RNA, 22 nt, synthetic construct
  source 1..22: mol_type = other RNA
aaaggcatgcgctcccgcaaaa

SEQ ID NO: 12914 - RNA, 22 nt, synthetic construct
  source 1..22: mol_type = other RNA
aaaggcgcggcgctgaggtttg

SEQ ID NO: 12915 - RNA, 22 nt, synthetic construct
  source 1..22: mol_type = other RNA
aaaggggcaagtagcgcgcgtc

SEQ ID NO: 12916 - RNA, 22 nt, synthetic construct
  source 1..22: mol_type = other RNA
aaaggtctcccctgctccccgc

SEQ ID NO: 12917 - RNA, 22 nt, synthetic construct
  source 1..22: mol_type = other RNA
aaagtaagaggcacagtacatc

SEQ ID NO: 12918 - RNA, 22 nt, synthetic construct
  source 1..22: mol_type = other RNA
aaagtccttggcacacagaaag

SEQ ID NO: 12919 - RNA, 22 nt, synthetic construct
  source 1..22: mol_type = other RNA
aaagtgacatgtgatgggaaca

SEQ ID NO: 12920 - RNA, 22 nt, synthetic construct
  source 1..22: mol_type = other RNA
aaagtttagggcgtcgataagc

SEQ ID NO: 12921 - RNA, 22 nt, synthetic construct
  source 1..22: mol_type = other RNA
aaatctcggtgccttagtttct

SEQ ID NO: 12922 - RNA, 22 nt, synthetic construct
  source 1..22: mol_type = other RNA
aaatgacgcaaagcacataaag

SEQ ID NO: 12923 - RNA, 22 nt, synthetic construct
  source 1..22: mol_type = other RNA
aaatgcacgaattacagccaaa

SEQ ID NO: 12924 - RNA, 22 nt, synthetic construct
  source 1..22: mol_type = other RNA
aaatggcagcaatcgagattga

SEQ ID NO: 12925 - RNA, 22 nt, synthetic construct
  source 1..22: mol_type = other RNA
aaattaaatgacgcaaagcaca

SEQ ID NO: 12926 - RNA, 22 nt, synthetic construct
  source 1..22: mol_type = other RNA
aaattataagaactacccgtta

SEQ ID NO: 12927 - RNA, 22 nt, synthetic construct
  source 1..22: mol_type = other RNA
aacaaaaattagccgggtgtgg

SEQ ID NO: 12928 - RNA, 22 nt, synthetic construct
  source 1..22: mol_type = other RNA
aacaaccaggcaaagagccaaa

SEQ ID NO: 12929 - RNA, 22 nt, synthetic construct
  source 1..22: mol_type = other RNA
aacagcacgcgacgtttgtaga

SEQ ID NO: 12930 - RNA, 22 nt, synthetic construct
  source 1..22: mol_type = other RNA
aacagttatcttccgccataga

SEQ ID NO: 12931 - RNA, 22 nt, synthetic construct
  source 1..22: mol_type = other RNA
aacatgagggggttgggcgtgg

SEQ ID NO: 12932 - RNA, 22 nt, synthetic construct
  source 1..22: mol_type = other RNA
aacatggtgaagcctggtctct

SEQ ID NO: 12933 - RNA, 22 nt, synthetic construct
  source 1..22: mol_type = other RNA
aaccaggcaaagagccaaagag

SEQ ID NO: 12934 - RNA, 22 nt, synthetic construct
  source 1..22: mol_type = other RNA
aaccagggcttttgcgggagcg

SEQ ID NO: 12935 - RNA, 22 nt, synthetic construct
  source 1..22: mol_type = other RNA
aaccatagtagttatctatggc

SEQ ID NO: 12936 - RNA, 22 nt, synthetic construct
  source 1..22: mol_type = other RNA
aaccccctcatgttttcaaaac

SEQ ID NO: 12937 - RNA, 22 nt, synthetic construct
  source 1..22: mol_type = other RNA
aaccctcccccaacctcggcgc

SEQ ID NO: 12938 - RNA, 22 nt, synthetic construct
  source 1..22: mol_type = other RNA
aaccgaaagtaagaggcacagt

SEQ ID NO: 12939 - RNA, 22 nt, synthetic construct
  source 1..22: mol_type = other RNA
aaccgctttgtatcacagccaa

SEQ ID NO: 12940 - RNA, 22 nt, synthetic construct
  source 1..22: mol_type = other RNA
aacctcagcgccgcgcctttgg

SEQ ID NO: 12941 - RNA, 22 nt, synthetic construct
  source 1..22: mol_type = other RNA
aacctcggcgctctgacgctta

SEQ ID NO: 12942 - RNA, 22 nt, synthetic construct
  source 1..22: mol_type = other RNA
aacgcctgccttctgcgtgaga

SEQ ID NO: 12943 - RNA, 22 nt, synthetic construct
  source 1..22: mol_type = other RNA
aacgcgtggaggggcgcttggg

SEQ ID NO: 12944 - RNA, 22 nt, synthetic construct
  source 1..22: mol_type = other RNA
aacgggtagttcttataatttt

SEQ ID NO: 12945 - RNA, 22 nt, synthetic construct
  source 1..22: mol_type = other RNA
aacgtcgcgtgctgtttcctcc

SEQ ID NO: 12946 - RNA, 22 nt, synthetic construct
  source 1..22: mol_type = other RNA
aactaaggcaccgagattttaa

SEQ ID NO: 12947 - RNA, 22 nt, synthetic construct
  source 1..22: mol_type = other RNA
aactacccgttattgacatctt

SEQ ID NO: 12948 - RNA, 22 nt, synthetic construct
  source 1..22: mol_type = other RNA
aactacggacctcaagccatcc

SEQ ID NO: 12949 - RNA, 22 nt, synthetic construct
  source 1..22: mol_type = other RNA
aactactatggttatcttctgc

SEQ ID NO: 12950 - RNA, 22 nt, synthetic construct
  source 1..22: mol_type = other RNA
aactgggcggcatgggccctgt

SEQ ID NO: 12951 - RNA, 22 nt, synthetic construct
  source 1..22: mol_type = other RNA
aacttaattacacaggggataa

SEQ ID NO: 12952 - RNA, 22 nt, synthetic construct
  source 1..22: mol_type = other RNA
aacttagcgggcgcctagacga

SEQ ID NO: 12953 - RNA, 22 nt, synthetic construct
  source 1..22: mol_type = other RNA
aacttatttgttcccatcacat

SEQ ID NO: 12954 - RNA, 22 nt, synthetic construct
  source 1..22: mol_type = other RNA
aacttggagaagggaagtcacg

SEQ ID NO: 12955 - RNA, 22 nt, synthetic construct
  source 1..22: mol_type = other RNA
aactttgtcccgaccctcccgt

SEQ ID NO: 12956 - RNA, 22 nt, synthetic construct
  source 1..22: mol_type = other RNA
aagaaaaacgcctgccttctgc

SEQ ID NO: 12957 - RNA, 22 nt, synthetic construct
  source 1..22: mol_type = other RNA
aagaaactaaggcaccgagatt

SEQ ID NO: 12958 - RNA, 22 nt, synthetic construct
  source 1..22: mol_type = other RNA
aagaaacttaattacacagggg

SEQ ID NO: 12959 - RNA, 22 nt, synthetic construct
  source 1..22: mol_type = other RNA
aagaactacccgttattgacat

SEQ ID NO: 12960 - RNA, 22 nt, synthetic construct
  source 1..22: mol_type = other RNA
aagaccacagggcccatgccgc

SEQ ID NO: 12961 - RNA, 22 nt, synthetic construct
  source 1..22: mol_type = other RNA
aagagaaaccctcccccaacct

SEQ ID NO: 12962 - RNA, 22 nt, synthetic construct
  source 1..22: mol_type = other RNA
aagagatcctcccgcctcagcc

SEQ ID NO: 12963 - RNA, 22 nt, synthetic construct
  source 1..22: mol_type = other RNA
aagagccaaagaggaagccctc

SEQ ID NO: 12964 - RNA, 22 nt, synthetic construct
  source 1..22: mol_type = other RNA
aagagcggaagagaaaccctcc

SEQ ID NO: 12965 - RNA, 22 nt, synthetic construct
  source 1..22: mol_type = other RNA
aagaggaagccctctgtacgaa

SEQ ID NO: 12966 - RNA, 22 nt, synthetic construct
  source 1..22: mol_type = other RNA
aagaggcacagtacatcttgga

SEQ ID NO: 12967 - RNA, 22 nt, synthetic construct
  source 1..22: mol_type = other RNA
aagataaccatagtagttatct

SEQ ID NO: 12968 - RNA, 22 nt, synthetic construct
  source 1..22: mol_type = other RNA
aagatgtactgtgcctcttact

SEQ ID NO: 12969 - RNA, 22 nt, synthetic construct
  source 1..22: mol_type = other RNA
aagatgtcaataacgggtagtt

SEQ ID NO: 12970 - RNA, 22 nt, synthetic construct
  source 1..22: mol_type = other RNA
aagcacataaagtccttggcac

SEQ ID NO: 12971 - RNA, 22 nt, synthetic construct
  source 1..22: mol_type = other RNA
aagcagagccgcagcagacagg

SEQ ID NO: 12972 - RNA, 22 nt, synthetic construct
  source 1..22: mol_type = other RNA
aagcattctacaaacgtcgcgt

SEQ ID NO: 12973 - RNA, 22 nt, synthetic construct
  source 1..22: mol_type = other RNA
aagccatcctcccgcctcggcc

SEQ ID NO: 12974 - RNA, 22 nt, synthetic construct
  source 1..22: mol_type = other RNA
aagccctctgtacgaaaagacc

SEQ ID NO: 12975 - RNA, 22 nt, synthetic construct
  source 1..22: mol_type = other RNA
aagccctggttaggcttgactt

SEQ ID NO: 12976 - RNA, 22 nt, synthetic construct
  source 1..22: mol_type = other RNA
aagcctaaccagggcttttgcg

SEQ ID NO: 12977 - RNA, 22 nt, synthetic construct
  source 1..22: mol_type = other RNA
aagcctaagctcaagagatcct

SEQ ID NO: 12978 - RNA, 22 nt, synthetic construct
  source 1..22: mol_type = other RNA
aagcctggtctctacaaaaaat

SEQ ID NO: 12979 - RNA, 22 nt, synthetic construct
  source 1..22: mol_type = other RNA
aagcctgtctgctgcggctctg

SEQ ID NO: 12980 - RNA, 22 nt, synthetic construct
  source 1..22: mol_type = other RNA
aagcgcccctccacgcgttcac

SEQ ID NO: 12981 - RNA, 22 nt, synthetic construct
  source 1..22: mol_type = other RNA
aagcggcggggtggcctgggag

SEQ ID NO: 12982 - RNA, 22 nt, synthetic construct
  source 1..22: mol_type = other RNA
aagcggtttcgaataattaact

SEQ ID NO: 12983 - RNA, 22 nt, synthetic construct
  source 1..22: mol_type = other RNA
aagcgtcagagcgccgaggttg

SEQ ID NO: 12984 - RNA, 22 nt, synthetic construct
  source 1..22: mol_type = other RNA
aagctaccacgcccaaccccct

SEQ ID NO: 12985 - RNA, 22 nt, synthetic construct
  source 1..22: mol_type = other RNA
aagctcaagagatcctcccgcc

SEQ ID NO: 12986 - RNA, 22 nt, synthetic construct
  source 1..22: mol_type = other RNA
aaggaccagagcgggagggtag

SEQ ID NO: 12987 - RNA, 22 nt, synthetic construct
  source 1..22: mol_type = other RNA
aaggactttatgtgctttgcgt

SEQ ID NO: 12988 - RNA, 22 nt, synthetic construct
  source 1..22: mol_type = other RNA
aaggagaacttggagaagggaa

SEQ ID NO: 12989 - RNA, 22 nt, synthetic construct
  source 1..22: mol_type = other RNA
aaggcaccgagattttaagaaa

SEQ ID NO: 12990 - RNA, 22 nt, synthetic construct
  source 1..22: mol_type = other RNA
aaggcaggcgtttttcttaaaa

SEQ ID NO: 12991 - RNA, 22 nt, synthetic construct
  source 1..22: mol_type = other RNA
aaggcatgcgctcccgcaaaag

SEQ ID NO: 12992 - RNA, 22 nt, synthetic construct
  source 1..22: mol_type = other RNA
aaggcgcggcgctgaggtttgt

SEQ ID NO: 12993 - RNA, 22 nt, synthetic construct
  source 1..22: mol_type = other RNA
aagggaagcagagccgcagcag

SEQ ID NO: 12994 - RNA, 22 nt, synthetic construct
  source 1..22: mol_type = other RNA
aagggaagtcacggagcgagag

SEQ ID NO: 12995 - RNA, 22 nt, synthetic construct
  source 1..22: mol_type = other RNA
aaggggcaagtagcgcgcgtcc

SEQ ID NO: 12996 - RNA, 22 nt, synthetic construct
  source 1..22: mol_type = other RNA
aagggggtgcgcacccgggacg

SEQ ID NO: 12997 - RNA, 22 nt, synthetic construct
  source 1..22: mol_type = other RNA
aaggtctcccctgctccccgcc

SEQ ID NO: 12998 - RNA, 22 nt, synthetic construct
  source 1..22: mol_type = other RNA
aagtaagaggcacagtacatct

SEQ ID NO: 12999 - RNA, 22 nt, synthetic construct
  source 1..22: mol_type = other RNA
aagtagcgcgcgtcccgggtgc

SEQ ID NO: 13000 - RNA, 22 nt, synthetic construct
  source 1..22: mol_type = other RNA
aagtcaagcctaaccagggctt

SEQ ID NO: 13001 - RNA, 22 nt, synthetic construct
  source 1..22: mol_type = other RNA
aagtcacggagcgagagagcac

SEQ ID NO: 13002 - RNA, 22 nt, synthetic construct
  source 1..22: mol_type = other RNA
aagtccacagctctccagtcta

SEQ ID NO: 13003 - RNA, 22 nt, synthetic construct
  source 1..22: mol_type = other RNA
aagtccttggcacacagaaaga

SEQ ID NO: 13004 - RNA, 22 nt, synthetic construct
  source 1..22: mol_type = other RNA
aagtgacatgtgatgggaacaa

SEQ ID NO: 13005 - RNA, 22 nt, synthetic construct
  source 1..22: mol_type = other RNA
aagttaattattcgaaaccgct

SEQ ID NO: 13006 - RNA, 22 nt, synthetic construct
  source 1..22: mol_type = other RNA
aagttcgcatgtcctagcacct

SEQ ID NO: 13007 - RNA, 22 nt, synthetic construct
  source 1..22: mol_type = other RNA
aagttctccttggtggcccgcc

SEQ ID NO: 13008 - RNA, 22 nt, synthetic construct
  source 1..22: mol_type = other RNA
aagtttagggcgtcgataagcg

SEQ ID NO: 13009 - RNA, 22 nt, synthetic construct
  source 1..22: mol_type = other RNA
aagtttcttaaaatctcggtgc

SEQ ID NO: 13010 - RNA, 22 nt, synthetic construct
  source 1..22: mol_type = other RNA
aataacgggtagttcttataat

SEQ ID NO: 13011 - RNA, 22 nt, synthetic construct
  source 1..22: mol_type = other RNA
aataataacaaaaattagccgg

SEQ ID NO: 13012 - RNA, 22 nt, synthetic construct
  source 1..22: mol_type = other RNA
aatcgagattgaagtcaagcct

SEQ ID NO: 13013 - RNA, 22 nt, synthetic construct
  source 1..22: mol_type = other RNA
aatctcacgcagaaggcaggcg

SEQ ID NO: 13014 - RNA, 22 nt, synthetic construct
  source 1..22: mol_type = other RNA
aatctcgattgctgccatttat

SEQ ID NO: 13015 - RNA, 22 nt, synthetic construct
  source 1..22: mol_type = other RNA
aatctcggtgccttagtttctt

SEQ ID NO: 13016 - RNA, 22 nt, synthetic construct
  source 1..22: mol_type = other RNA
aatgacgcaaagcacataaagt

SEQ ID NO: 13017 - RNA, 22 nt, synthetic construct
  source 1..22: mol_type = other RNA
aatgcacgaattacagccaaaa

SEQ ID NO: 13018 - RNA, 22 nt, synthetic construct
  source 1..22: mol_type = other RNA
aatgcttggctgtgatacaaag

SEQ ID NO: 13019 - RNA, 22 nt, synthetic construct
  source 1..22: mol_type = other RNA
aatggcagcaatcgagattgaa

SEQ ID NO: 13020 - RNA, 22 nt, synthetic construct
  source 1..22: mol_type = other RNA
aattaaatgacgcaaagcacat

SEQ ID NO: 13021 - RNA, 22 nt, synthetic construct
  source 1..22: mol_type = other RNA
aattaacttatttgttcccatc

SEQ ID NO: 13022 - RNA, 22 nt, synthetic construct
  source 1..22: mol_type = other RNA
aattacacaggggataaatggc

SEQ ID NO: 13023 - RNA, 22 nt, synthetic construct
  source 1..22: mol_type = other RNA
aattacagccaaaaggcatgcg

SEQ ID NO: 13024 - RNA, 22 nt, synthetic construct
  source 1..22: mol_type = other RNA
aattataagaactacccgttat

SEQ ID NO: 13025 - RNA, 22 nt, synthetic construct
  source 1..22: mol_type = other RNA
aattattcgaaaccgctttgta

SEQ ID NO: 13026 - RNA, 22 nt, synthetic construct
  source 1..22: mol_type = other RNA
acaaacctcagcgccgcgcctt

SEQ ID NO: 13027 - RNA, 22 nt, synthetic construct
  source 1..22: mol_type = other RNA
acaaacgtcgcgtgctgtttcc

SEQ ID NO: 13028 - RNA, 22 nt, synthetic construct
  source 1..22: mol_type = other RNA
acaaagcggtttcgaataatta

SEQ ID NO: 13029 - RNA, 22 nt, synthetic construct
  source 1..22: mol_type = other RNA
acaaagtttagggcgtcgataa

SEQ ID NO: 13030 - RNA, 22 nt, synthetic construct
  source 1..22: mol_type = other RNA
acaaccaggcaaagagccaaag

SEQ ID NO: 13031 - RNA, 22 nt, synthetic construct
  source 1..22: mol_type = other RNA
acacagaaagatgtcaataacg

SEQ ID NO: 13032 - RNA, 22 nt, synthetic construct
  source 1..22: mol_type = other RNA
acacaggggataaatggcagca

SEQ ID NO: 13033 - RNA, 22 nt, synthetic construct
  source 1..22: mol_type = other RNA
acacccggctaatttttgttat

SEQ ID NO: 13034 - RNA, 22 nt, synthetic construct
  source 1..22: mol_type = other RNA
acaccgtggggaggaaacagca

SEQ ID NO: 13035 - RNA, 22 nt, synthetic construct
  source 1..22: mol_type = other RNA
acagaaagatgtcaataacggg

SEQ ID NO: 13036 - RNA, 22 nt, synthetic construct
  source 1..22: mol_type = other RNA
acagagggcttcctctttggct

SEQ ID NO: 13037 - RNA, 22 nt, synthetic construct
  source 1..22: mol_type = other RNA
acagagggtgcagagcgggaga

SEQ ID NO: 13038 - RNA, 22 nt, synthetic construct
  source 1..22: mol_type = other RNA
acagatgaagaaactaaggcac

SEQ ID NO: 13039 - RNA, 22 nt, synthetic construct
  source 1..22: mol_type = other RNA
acagcacgcgacgtttgtagaa

SEQ ID NO: 13040 - RNA, 22 nt, synthetic construct
  source 1..22: mol_type = other RNA
acagccaaaaggcatgcgctcc

SEQ ID NO: 13041 - RNA, 22 nt, synthetic construct
  source 1..22: mol_type = other RNA
acagccaagcattctacaaacg

SEQ ID NO: 13042 - RNA, 22 nt, synthetic construct
  source 1..22: mol_type = other RNA
acagcgagggccacagagggtg

SEQ ID NO: 13043 - RNA, 22 nt, synthetic construct
  source 1..22: mol_type = other RNA
acagctctccagtctaagggaa

SEQ ID NO: 13044 - RNA, 22 nt, synthetic construct
  source 1..22: mol_type = other RNA
acaggcgtaagctaccacgccc

SEQ ID NO: 13045 - RNA, 22 nt, synthetic construct
  source 1..22: mol_type = other RNA
acaggcttacccgggcgacgcc

SEQ ID NO: 13046 - RNA, 22 nt, synthetic construct
  source 1..22: mol_type = other RNA
acagggcccatgccgcccagtt

SEQ ID NO: 13047 - RNA, 22 nt, synthetic construct
  source 1..22: mol_type = other RNA
acaggggataaatggcagcaat

SEQ ID NO: 13048 - RNA, 22 nt, synthetic construct
  source 1..22: mol_type = other RNA
acagtacatcttggaaacaacc

SEQ ID NO: 13049 - RNA, 22 nt, synthetic construct
  source 1..22: mol_type = other RNA
acagttatcttccgccatagat

SEQ ID NO: 13050 - RNA, 22 nt, synthetic construct
  source 1..22: mol_type = other RNA
acataaagtccttggcacacag

SEQ ID NO: 13051 - RNA, 22 nt, synthetic construct
  source 1..22: mol_type = other RNA
acatagacccagaggtgctagg

SEQ ID NO: 13052 - RNA, 22 nt, synthetic construct
  source 1..22: mol_type = other RNA
acatcttggaaacaaccaggca

SEQ ID NO: 13053 - RNA, 22 nt, synthetic construct
  source 1..22: mol_type = other RNA
acatctttctgtgtgccaagga

SEQ ID NO: 13054 - RNA, 22 nt, synthetic construct
  source 1..22: mol_type = other RNA
acatgagggggttgggcgtggt

SEQ ID NO: 13055 - RNA, 22 nt, synthetic construct
  source 1..22: mol_type = other RNA
acatgcgaacttagcgggcgcc

SEQ ID NO: 13056 - RNA, 22 nt, synthetic construct
  source 1..22: mol_type = other RNA
acatggtgaagcctggtctcta

SEQ ID NO: 13057 - RNA, 22 nt, synthetic construct
  source 1..22: mol_type = other RNA
acatgtgatgggaacaaataag

SEQ ID NO: 13058 - RNA, 22 nt, synthetic construct
  source 1..22: mol_type = other RNA
accaaggagaacttggagaagg

SEQ ID NO: 13059 - RNA, 22 nt, synthetic construct
  source 1..22: mol_type = other RNA
accacacccggctaatttttgt

SEQ ID NO: 13060 - RNA, 22 nt, synthetic construct
  source 1..22: mol_type = other RNA
accacaggcacgagccaccaca

SEQ ID NO: 13061 - RNA, 22 nt, synthetic construct
  source 1..22: mol_type = other RNA
accacagggcccatgccgccca

SEQ ID NO: 13062 - RNA, 22 nt, synthetic construct
  source 1..22: mol_type = other RNA
accacgcccaaccccctcatgt

SEQ ID NO: 13063 - RNA, 22 nt, synthetic construct
  source 1..22: mol_type = other RNA
accaggcaaagagccaaagagg

SEQ ID NO: 13064 - RNA, 22 nt, synthetic construct
  source 1..22: mol_type = other RNA
accagggcttttgcgggagcgc

SEQ ID NO: 13065 - RNA, 22 nt, synthetic construct
  source 1..22: mol_type = other RNA
accatagtagttatctatggcg

SEQ ID NO: 13066 - RNA, 22 nt, synthetic construct
  source 1..22: mol_type = other RNA
accatgttggccaggctggtct

SEQ ID NO: 13067 - RNA, 22 nt, synthetic construct
  source 1..22: mol_type = other RNA
acccagaggtgctaggacatgc

SEQ ID NO: 13068 - RNA, 22 nt, synthetic construct
  source 1..22: mol_type = other RNA
accccaagcgcccctccacgcg

SEQ ID NO: 13069 - RNA, 22 nt, synthetic construct
  source 1..22: mol_type = other RNA
accccctcatgttttcaaaacc

SEQ ID NO: 13070 - RNA, 22 nt, synthetic construct
  source 1..22: mol_type = other RNA
acccccttccccactcccaggc

SEQ ID NO: 13071 - RNA, 22 nt, synthetic construct
  source 1..22: mol_type = other RNA
accccgccgcttccccgagatc

SEQ ID NO: 13072 - RNA, 22 nt, synthetic construct
  source 1..22: mol_type = other RNA
acccggctaatttttgttatta

SEQ ID NO: 13073 - RNA, 22 nt, synthetic construct
  source 1..22: mol_type = other RNA
acccgggacgcgcgctacttgc

SEQ ID NO: 13074 - RNA, 22 nt, synthetic construct
  source 1..22: mol_type = other RNA
acccgtcccccactccagctgc

SEQ ID NO: 13075 - RNA, 22 nt, synthetic construct
  source 1..22: mol_type = other RNA
acccgttattgacatctttctg

SEQ ID NO: 13076 - RNA, 22 nt, synthetic construct
  source 1..22: mol_type = other RNA
accctcccccaacctcggcgct

SEQ ID NO: 13077 - RNA, 22 nt, synthetic construct
  source 1..22: mol_type = other RNA
accctcccgctctggtccttcc

SEQ ID NO: 13078 - RNA, 22 nt, synthetic construct
  source 1..22: mol_type = other RNA
accctcccgtcgccgtaggcca

SEQ ID NO: 13079 - RNA, 22 nt, synthetic construct
  source 1..22: mol_type = other RNA
accctctgtggccctcgctgtg

SEQ ID NO: 13080 - RNA, 22 nt, synthetic construct
  source 1..22: mol_type = other RNA
accgaaagtaagaggcacagta

SEQ ID NO: 13081 - RNA, 22 nt, synthetic construct
  source 1..22: mol_type = other RNA
accgagattttaagaaacttaa

SEQ ID NO: 13082 - RNA, 22 nt, synthetic construct
  source 1..22: mol_type = other RNA
accgctttgtatcacagccaag

SEQ ID NO: 13083 - RNA, 22 nt, synthetic construct
  source 1..22: mol_type = other RNA
accggagcagctgggaccacag

SEQ ID NO: 13084 - RNA, 22 nt, synthetic construct
  source 1..22: mol_type = other RNA
accgtggggaggaaacagcacg

SEQ ID NO: 13085 - RNA, 22 nt, synthetic construct
  source 1..22: mol_type = other RNA
acctcaagccatcctcccgcct

SEQ ID NO: 13086 - RNA, 22 nt, synthetic construct
  source 1..22: mol_type = other RNA
acctcagcgccgcgcctttggg

SEQ ID NO: 13087 - RNA, 22 nt, synthetic construct
  source 1..22: mol_type = other RNA
acctcggcgctctgacgcttat

SEQ ID NO: 13088 - RNA, 22 nt, synthetic construct
  source 1..22: mol_type = other RNA
acctctgggtctatgtggggcc

SEQ ID NO: 13089 - RNA, 22 nt, synthetic construct
  source 1..22: mol_type = other RNA
acctttggcctacggcgacggg

SEQ ID NO: 13090 - RNA, 22 nt, synthetic construct
  source 1..22: mol_type = other RNA
acgaaaagaccacagggcccat

SEQ ID NO: 13091 - RNA, 22 nt, synthetic construct
  source 1..22: mol_type = other RNA
acgaagtccacagctctccagt

SEQ ID NO: 13092 - RNA, 22 nt, synthetic construct
  source 1..22: mol_type = other RNA
acgaattacagccaaaaggcat

SEQ ID NO: 13093 - RNA, 22 nt, synthetic construct
  source 1..22: mol_type = other RNA
acgagccaccacacccggctaa

SEQ ID NO: 13094 - RNA, 22 nt, synthetic construct
  source 1..22: mol_type = other RNA
acgagcctacccgtcccccact

SEQ ID NO: 13095 - RNA, 22 nt, synthetic construct
  source 1..22: mol_type = other RNA
acgcaaagcacataaagtcctt

SEQ ID NO: 13096 - RNA, 22 nt, synthetic construct
  source 1..22: mol_type = other RNA
acgcagaaggcaggcgtttttc

SEQ ID NO: 13097 - RNA, 22 nt, synthetic construct
  source 1..22: mol_type = other RNA
acgcccaaccccctcatgtttt

SEQ ID NO: 13098 - RNA, 22 nt, synthetic construct
  source 1..22: mol_type = other RNA
acgccctaaactttgtcccgac

SEQ ID NO: 13099 - RNA, 22 nt, synthetic construct
  source 1..22: mol_type = other RNA
acgcctcccccagaccccaagc

SEQ ID NO: 13100 - RNA, 22 nt, synthetic construct
  source 1..22: mol_type = other RNA
acgcctgccttctgcgtgagat

SEQ ID NO: 13101 - RNA, 22 nt, synthetic construct
  source 1..22: mol_type = other RNA
acgcgacgtttgtagaatgctt

SEQ ID NO: 13102 - RNA, 22 nt, synthetic construct
  source 1..22: mol_type = other RNA
acgcgcgctacttgcccctttc

SEQ ID NO: 13103 - RNA, 22 nt, synthetic construct
  source 1..22: mol_type = other RNA
acgcgtggaggggcgcttgggg

SEQ ID NO: 13104 - RNA, 22 nt, synthetic construct
  source 1..22: mol_type = other RNA
acgcgttcacaaacctcagcgc

SEQ ID NO: 13105 - RNA, 22 nt, synthetic construct
  source 1..22: mol_type = other RNA
acgctggagtgcactggcgcca

SEQ ID NO: 13106 - RNA, 22 nt, synthetic construct
  source 1..22: mol_type = other RNA
acgcttatcgacgccctaaact

SEQ ID NO: 13107 - RNA, 22 nt, synthetic construct
  source 1..22: mol_type = other RNA
acggacctcaagccatcctccc

SEQ ID NO: 13108 - RNA, 22 nt, synthetic construct
  source 1..22: mol_type = other RNA
acggagcgagagagcacagcga

SEQ ID NO: 13109 - RNA, 22 nt, synthetic construct
  source 1..22: mol_type = other RNA
acggcgacgggagggtcgggac

SEQ ID NO: 13110 - RNA, 22 nt, synthetic construct
  source 1..22: mol_type = other RNA
acggcgggccaccaaggagaac

SEQ ID NO: 13111 - RNA, 22 nt, synthetic construct
  source 1..22: mol_type = other RNA
acgggagggtcgggacaaagtt

SEQ ID NO: 13112 - RNA, 22 nt, synthetic construct
  source 1..22: mol_type = other RNA
acgggtaggctcgtcccaaagg

SEQ ID NO: 13113 - RNA, 22 nt, synthetic construct
  source 1..22: mol_type = other RNA
acgggtagttcttataattttt

SEQ ID NO: 13114 - RNA, 22 nt, synthetic construct
  source 1..22: mol_type = other RNA
acggtgtggccccacatagacc

SEQ ID NO: 13115 - RNA, 22 nt, synthetic construct
  source 1..22: mol_type = other RNA
acgtcgcgtgctgtttcctccc

SEQ ID NO: 13116 - RNA, 22 nt, synthetic construct
  source 1..22: mol_type = other RNA
acgtttgtagaatgcttggctg

SEQ ID NO: 13117 - RNA, 22 nt, synthetic construct
  source 1..22: mol_type = other RNA
actaaggcaccgagattttaag

SEQ ID NO: 13118 - RNA, 22 nt, synthetic construct
  source 1..22: mol_type = other RNA
actacccgttattgacatcttt

SEQ ID NO: 13119 - RNA, 22 nt, synthetic construct
  source 1..22: mol_type = other RNA
actacggacctcaagccatcct

SEQ ID NO: 13120 - RNA, 22 nt, synthetic construct
  source 1..22: mol_type = other RNA
actactatggttatcttctgcc

SEQ ID NO: 13121 - RNA, 22 nt, synthetic construct
  source 1..22: mol_type = other RNA
actagccccacggcgggccacc

SEQ ID NO: 13122 - RNA, 22 nt, synthetic construct
  source 1..22: mol_type = other RNA
actatggttatcttctgcctct

SEQ ID NO: 13123 - RNA, 22 nt, synthetic construct
  source 1..22: mol_type = other RNA
actccagctgcgctgggggagc

SEQ ID NO: 13124 - RNA, 22 nt, synthetic construct
  source 1..22: mol_type = other RNA
actcccaggccaccccgccgct

SEQ ID NO: 13125 - RNA, 22 nt, synthetic construct
  source 1..22: mol_type = other RNA
actggagagctgtggacttcgt

SEQ ID NO: 13126 - RNA, 22 nt, synthetic construct
  source 1..22: mol_type = other RNA
actggcgccatgatagctcaaa

SEQ ID NO: 13127 - RNA, 22 nt, synthetic construct
  source 1..22: mol_type = other RNA
actgggcggcatgggccctgtg

SEQ ID NO: 13128 - RNA, 22 nt, synthetic construct
  source 1..22: mol_type = other RNA
actgtgcctcttactttcggtt

SEQ ID NO: 13129 - RNA, 22 nt, synthetic construct
  source 1..22: mol_type = other RNA
acttaattacacaggggataaa

SEQ ID NO: 13130 - RNA, 22 nt, synthetic construct
  source 1..22: mol_type = other RNA
acttagcgggcgcctagacgaa

SEQ ID NO: 13131 - RNA, 22 nt, synthetic construct
  source 1..22: mol_type = other RNA
acttagggaggccgaggcggga

SEQ ID NO: 13132 - RNA, 22 nt, synthetic construct
  source 1..22: mol_type = other RNA
acttatttgttcccatcacatg

SEQ ID NO: 13133 - RNA, 22 nt, synthetic construct
  source 1..22: mol_type = other RNA
acttcaatctcgattgctgcca

SEQ ID NO: 13134 - RNA, 22 nt, synthetic construct
  source 1..22: mol_type = other RNA
acttcccttctccaagttctcc

SEQ ID NO: 13135 - RNA, 22 nt, synthetic construct
  source 1..22: mol_type = other RNA
acttcgtctaggcgcccgctaa

SEQ ID NO: 13136 - RNA, 22 nt, synthetic construct
  source 1..22: mol_type = other RNA
acttgcccctttcggcggggag

SEQ ID NO: 13137 - RNA, 22 nt, synthetic construct
  source 1..22: mol_type = other RNA
acttggagaagggaagtcacgg

SEQ ID NO: 13138 - RNA, 22 nt, synthetic construct
  source 1..22: mol_type = other RNA
actttatgtgctttgcgtcatt

SEQ ID NO: 13139 - RNA, 22 nt, synthetic construct
  source 1..22: mol_type = other RNA
actttcggttttgaaaacatga

SEQ ID NO: 13140 - RNA, 22 nt, synthetic construct
  source 1..22: mol_type = other RNA
actttgtcccgaccctcccgtc

SEQ ID NO: 13141 - RNA, 22 nt, synthetic construct
  source 1..22: mol_type = other RNA
agaaaaacgcctgccttctgcg

SEQ ID NO: 13142 - RNA, 22 nt, synthetic construct
  source 1..22: mol_type = other RNA
agaaaccctcccccaacctcgg

SEQ ID NO: 13143 - RNA, 22 nt, synthetic construct
  source 1..22: mol_type = other RNA
agaaactaaggcaccgagattt

SEQ ID NO: 13144 - RNA, 22 nt, synthetic construct
  source 1..22: mol_type = other RNA
agaaacttaattacacagggga

SEQ ID NO: 13145 - RNA, 22 nt, synthetic construct
  source 1..22: mol_type = other RNA
agaaagatgtcaataacgggta

SEQ ID NO: 13146 - RNA, 22 nt, synthetic construct
  source 1..22: mol_type = other RNA
agaactacccgttattgacatc

SEQ ID NO: 13147 - RNA, 22 nt, synthetic construct
  source 1..22: mol_type = other RNA
agaacttggagaagggaagtca

SEQ ID NO: 13148 - RNA, 22 nt, synthetic construct
  source 1..22: mol_type = other RNA
agaagataaccatagtagttat

SEQ ID NO: 13149 - RNA, 22 nt, synthetic construct
  source 1..22: mol_type = other RNA
agaaggcaggcgtttttcttaa

SEQ ID NO: 13150 - RNA, 22 nt, synthetic construct
  source 1..22: mol_type = other RNA
agaagggaagtcacggagcgag

SEQ ID NO: 13151 - RNA, 22 nt, synthetic construct
  source 1..22: mol_type = other RNA
agaatctcacgcagaaggcagg

SEQ ID NO: 13152 - RNA, 22 nt, synthetic construct
  source 1..22: mol_type = other RNA
agaatgcttggctgtgatacaa

SEQ ID NO: 13153 - RNA, 22 nt, synthetic construct
  source 1..22: mol_type = other RNA
agacaggcttacccgggcgacg

SEQ ID NO: 13154 - RNA, 22 nt, synthetic construct
  source 1..22: mol_type = other RNA
agaccacagggcccatgccgcc

SEQ ID NO: 13155 - RNA, 22 nt, synthetic construct
  source 1..22: mol_type = other RNA
agacccagaggtgctaggacat

SEQ ID NO: 13156 - RNA, 22 nt, synthetic construct
  source 1..22: mol_type = other RNA
agaccccaagcgcccctccacg

SEQ ID NO: 13157 - RNA, 22 nt, synthetic construct
  source 1..22: mol_type = other RNA
agacctttggcctacggcgacg

SEQ ID NO: 13158 - RNA, 22 nt, synthetic construct
  source 1..22: mol_type = other RNA
agacgaagtccacagctctcca

SEQ ID NO: 13159 - RNA, 22 nt, synthetic construct
  source 1..22: mol_type = other RNA
agactggagagctgtggacttc

SEQ ID NO: 13160 - RNA, 22 nt, synthetic construct
  source 1..22: mol_type = other RNA
agagaaaccctcccccaacctc

SEQ ID NO: 13161 - RNA, 22 nt, synthetic construct
  source 1..22: mol_type = other RNA
agagagcacagcgagggccaca

SEQ ID NO: 13162 - RNA, 22 nt, synthetic construct
  source 1..22: mol_type = other RNA
agagatcctcccgcctcagcca

SEQ ID NO: 13163 - RNA, 22 nt, synthetic construct
  source 1..22: mol_type = other RNA
agagcaaactgggcggcatggg

SEQ ID NO: 13164 - RNA, 22 nt, synthetic construct
  source 1..22: mol_type = other RNA
agagcacagcgagggccacaga

SEQ ID NO: 13165 - RNA, 22 nt, synthetic construct
  source 1..22: mol_type = other RNA
agagccaaagaggaagccctct

SEQ ID NO: 13166 - RNA, 22 nt, synthetic construct
  source 1..22: mol_type = other RNA
agagccgcagcagacaggctta

SEQ ID NO: 13167 - RNA, 22 nt, synthetic construct
  source 1..22: mol_type = other RNA
agagcgccgaggttgggggagg

SEQ ID NO: 13168 - RNA, 22 nt, synthetic construct
  source 1..22: mol_type = other RNA
agagcggaagagaaaccctccc

SEQ ID NO: 13169 - RNA, 22 nt, synthetic construct
  source 1..22: mol_type = other RNA
agagcgggagaggaaggaccag

SEQ ID NO: 13170 - RNA, 22 nt, synthetic construct
  source 1..22: mol_type = other RNA
agagctgtggacttcgtctagg

SEQ ID NO: 13171 - RNA, 22 nt, synthetic construct
  source 1..22: mol_type = other RNA
agaggaagccctctgtacgaaa

SEQ ID NO: 13172 - RNA, 22 nt, synthetic construct
  source 1..22: mol_type = other RNA
agaggaaggaccagagcgggag

SEQ ID NO: 13173 - RNA, 22 nt, synthetic construct
  source 1..22: mol_type = other RNA
agaggcacagtacatcttggaa

SEQ ID NO: 13174 - RNA, 22 nt, synthetic construct
  source 1..22: mol_type = other RNA
agaggcagaagataaccatagt

SEQ ID NO: 13175 - RNA, 22 nt, synthetic construct
  source 1..22: mol_type = other RNA
agaggccccgcgaaagagcgga

SEQ ID NO: 13176 - RNA, 22 nt, synthetic construct
  source 1..22: mol_type = other RNA
agagggcttcctctttggctct

SEQ ID NO: 13177 - RNA, 22 nt, synthetic construct
  source 1..22: mol_type = other RNA
agagggtgcagagcgggagagg

SEQ ID NO: 13178 - RNA, 22 nt, synthetic construct
  source 1..22: mol_type = other RNA
agaggtgctaggacatgcgaac

SEQ ID NO: 13179 - RNA, 22 nt, synthetic construct
  source 1..22: mol_type = other RNA
agataaccatagtagttatcta

SEQ ID NO: 13180 - RNA, 22 nt, synthetic construct
  source 1..22: mol_type = other RNA
agataactactatggttatctt

SEQ ID NO: 13181 - RNA, 22 nt, synthetic construct
  source 1..22: mol_type = other RNA
agatccagccctggactagccc

SEQ ID NO: 13182 - RNA, 22 nt, synthetic construct
  source 1..22: mol_type = other RNA
agatcctcccgcctcagccacc

SEQ ID NO: 13183 - RNA, 22 nt, synthetic construct
  source 1..22: mol_type = other RNA
agatgaagaaactaaggcaccg

SEQ ID NO: 13184 - RNA, 22 nt, synthetic construct
  source 1..22: mol_type = other RNA
agatgtactgtgcctcttactt

SEQ ID NO: 13185 - RNA, 22 nt, synthetic construct
  source 1..22: mol_type = other RNA
agatgtcaataacgggtagttc

SEQ ID NO: 13186 - RNA, 22 nt, synthetic construct
  source 1..22: mol_type = other RNA
agattctccagagcaaactggg

SEQ ID NO: 13187 - RNA, 22 nt, synthetic construct
  source 1..22: mol_type = other RNA
agattgaagtcaagcctaacca

SEQ ID NO: 13188 - RNA, 22 nt, synthetic construct
  source 1..22: mol_type = other RNA
agcaaactgggcggcatgggcc

SEQ ID NO: 13189 - RNA, 22 nt, synthetic construct
  source 1..22: mol_type = other RNA
agcaatcgagattgaagtcaag

SEQ ID NO: 13190 - RNA, 22 nt, synthetic construct
  source 1..22: mol_type = other RNA
agcacagcgagggccacagagg

SEQ ID NO: 13191 - RNA, 22 nt, synthetic construct
  source 1..22: mol_type = other RNA
agcacataaagtccttggcaca

SEQ ID NO: 13192 - RNA, 22 nt, synthetic construct
  source 1..22: mol_type = other RNA
agcacctctgggtctatgtggg

SEQ ID NO: 13193 - RNA, 22 nt, synthetic construct
  source 1..22: mol_type = other RNA
agcacgcgacgtttgtagaatg

SEQ ID NO: 13194 - RNA, 22 nt, synthetic construct
  source 1..22: mol_type = other RNA
agcacttagggaggccgaggcg

SEQ ID NO: 13195 - RNA, 22 nt, synthetic construct
  source 1..22: mol_type = other RNA
agcagacaggcttacccgggcg

SEQ ID NO: 13196 - RNA, 22 nt, synthetic construct
  source 1..22: mol_type = other RNA
agcagagccgcagcagacaggc

SEQ ID NO: 13197 - RNA, 22 nt, synthetic construct
  source 1..22: mol_type = other RNA
agcagctgggaccacaggcacg

SEQ ID NO: 13198 - RNA, 22 nt, synthetic construct
  source 1..22: mol_type = other RNA
agcaggggagacctttggccta

SEQ ID NO: 13199 - RNA, 22 nt, synthetic construct
  source 1..22: mol_type = other RNA
agcattctacaaacgtcgcgtg

SEQ ID NO: 13200 - RNA, 22 nt, synthetic construct
  source 1..22: mol_type = other RNA
agccaaaaggcatgcgctcccg

SEQ ID NO: 13201 - RNA, 22 nt, synthetic construct
  source 1..22: mol_type = other RNA
agccaaagaggaagccctctgt

SEQ ID NO: 13202 - RNA, 22 nt, synthetic construct
  source 1..22: mol_type = other RNA
agccaagcattctacaaacgtc

SEQ ID NO: 13203 - RNA, 22 nt, synthetic construct
  source 1..22: mol_type = other RNA
agccaccggagcagctgggacc

SEQ ID NO: 13204 - RNA, 22 nt, synthetic construct
  source 1..22: mol_type = other RNA
agccagaggccccgcgaaagag

SEQ ID NO: 13205 - RNA, 22 nt, synthetic construct
  source 1..22: mol_type = other RNA
agccatcctcccgcctcggcct

SEQ ID NO: 13206 - RNA, 22 nt, synthetic construct
  source 1..22: mol_type = other RNA
agccccacggcgggccaccaag

SEQ ID NO: 13207 - RNA, 22 nt, synthetic construct
  source 1..22: mol_type = other RNA
agccctctgtacgaaaagacca

SEQ ID NO: 13208 - RNA, 22 nt, synthetic construct
  source 1..22: mol_type = other RNA
agccctggactagccccacggc

SEQ ID NO: 13209 - RNA, 22 nt, synthetic construct
  source 1..22: mol_type = other RNA
agccctggttaggcttgacttc

SEQ ID NO: 13210 - RNA, 22 nt, synthetic construct
  source 1..22: mol_type = other RNA
agccgcagcagacaggcttacc

SEQ ID NO: 13211 - RNA, 22 nt, synthetic construct
  source 1..22: mol_type = other RNA
agccgggtgtggtggctcgtgc

SEQ ID NO: 13212 - RNA, 22 nt, synthetic construct
  source 1..22: mol_type = other RNA
agcctaaccagggcttttgcgg

SEQ ID NO: 13213 - RNA, 22 nt, synthetic construct
  source 1..22: mol_type = other RNA
agcctaagctcaagagatcctc

SEQ ID NO: 13214 - RNA, 22 nt, synthetic construct
  source 1..22: mol_type = other RNA
agcctacccgtcccccactcca

SEQ ID NO: 13215 - RNA, 22 nt, synthetic construct
  source 1..22: mol_type = other RNA
agcctggtctctacaaaaaata

SEQ ID NO: 13216 - RNA, 22 nt, synthetic construct
  source 1..22: mol_type = other RNA
agcctgtctgctgcggctctgc

SEQ ID NO: 13217 - RNA, 22 nt, synthetic construct
  source 1..22: mol_type = other RNA
agcgagagagcacagcgagggc

SEQ ID NO: 13218 - RNA, 22 nt, synthetic construct
  source 1..22: mol_type = other RNA
agcgagggccacagagggtgca

SEQ ID NO: 13219 - RNA, 22 nt, synthetic construct
  source 1..22: mol_type = other RNA
agcgcagctggagtgggggacg

SEQ ID NO: 13220 - RNA, 22 nt, synthetic construct
  source 1..22: mol_type = other RNA
agcgcatgccttttggctgtaa

SEQ ID NO: 13221 - RNA, 22 nt, synthetic construct
  source 1..22: mol_type = other RNA
agcgcccctccacgcgttcaca

SEQ ID NO: 13222 - RNA, 22 nt, synthetic construct
  source 1..22: mol_type = other RNA
agcgccgaggttgggggagggt

SEQ ID NO: 13223 - RNA, 22 nt, synthetic construct
  source 1..22: mol_type = other RNA
agcgccgcgcctttgggacgag

SEQ ID NO: 13224 - RNA, 22 nt, synthetic construct
  source 1..22: mol_type = other RNA
agcggaagagaaaccctccccc

SEQ ID NO: 13225 - RNA, 22 nt, synthetic construct
  source 1..22: mol_type = other RNA
agcggcggggtggcctgggagt

SEQ ID NO: 13226 - RNA, 22 nt, synthetic construct
  source 1..22: mol_type = other RNA
agcgggagaggaaggaccagag

SEQ ID NO: 13227 - RNA, 22 nt, synthetic construct
  source 1..22: mol_type = other RNA
agcgggcgcctagacgaagtcc

SEQ ID NO: 13228 - RNA, 22 nt, synthetic construct
  source 1..22: mol_type = other RNA
agcggtttcgaataattaactt

SEQ ID NO: 13229 - RNA, 22 nt, synthetic construct
  source 1..22: mol_type = other RNA
agcgtcagagcgccgaggttgg

SEQ ID NO: 13230 - RNA, 22 nt, synthetic construct
  source 1..22: mol_type = other RNA
agctaccacgcccaaccccctc

SEQ ID NO: 13231 - RNA, 22 nt, synthetic construct
  source 1..22: mol_type = other RNA
agctatcatggcgccagtgcac

SEQ ID NO: 13232 - RNA, 22 nt, synthetic construct
  source 1..22: mol_type = other RNA
agctcaaaagcctaagctcaag

SEQ ID NO: 13233 - RNA, 22 nt, synthetic construct
  source 1..22: mol_type = other RNA
agctctccagtctaagggaagc

SEQ ID NO: 13234 - RNA, 22 nt, synthetic construct
  source 1..22: mol_type = other RNA
agctgcgctgggggagccagag

SEQ ID NO: 13235 - RNA, 22 nt, synthetic construct
  source 1..22: mol_type = other RNA
agctgctccggtggctgaggcg

SEQ ID NO: 13236 - RNA, 22 nt, synthetic construct
  source 1..22: mol_type = other RNA
agctggagtgggggacgggtag

SEQ ID NO: 13237 - RNA, 22 nt, synthetic construct
  source 1..22: mol_type = other RNA
agctgtggacttcgtctaggcg

SEQ ID NO: 13238 - RNA, 22 nt, synthetic construct
  source 1..22: mol_type = other RNA
agcttaggcttttgagctatca

SEQ ID NO: 13239 - RNA, 22 nt, synthetic construct
  source 1..22: mol_type = other RNA
aggaaacagcacgcgacgtttg

SEQ ID NO: 13240 - RNA, 22 nt, synthetic construct
  source 1..22: mol_type = other RNA
aggaagccctctgtacgaaaag

SEQ ID NO: 13241 - RNA, 22 nt, synthetic construct
  source 1..22: mol_type = other RNA
aggaaggaccagagcgggaggg

SEQ ID NO: 13242 - RNA, 22 nt, synthetic construct
  source 1..22: mol_type = other RNA
aggacatgcgaacttagcgggc

SEQ ID NO: 13243 - RNA, 22 nt, synthetic construct
  source 1..22: mol_type = other RNA
aggaccagagcgggagggtagg

SEQ ID NO: 13244 - RNA, 22 nt, synthetic construct
  source 1..22: mol_type = other RNA
aggactttatgtgctttgcgtc

SEQ ID NO: 13245 - RNA, 22 nt, synthetic construct
  source 1..22: mol_type = other RNA
aggagaacttggagaagggaag

SEQ ID NO: 13246 - RNA, 22 nt, synthetic construct
  source 1..22: mol_type = other RNA
aggatctcttgagcttaggctt

SEQ ID NO: 13247 - RNA, 22 nt, synthetic construct
  source 1..22: mol_type = other RNA
aggatggcttgaggtccgtagt

SEQ ID NO: 13248 - RNA, 22 nt, synthetic construct
  source 1..22: mol_type = other RNA
aggcaaagagccaaagaggaag

SEQ ID NO: 13249 - RNA, 22 nt, synthetic construct
  source 1..22: mol_type = other RNA
aggcacagtacatcttggaaac

SEQ ID NO: 13250 - RNA, 22 nt, synthetic construct
  source 1..22: mol_type = other RNA
aggcaccgagattttaagaaac

SEQ ID NO: 13251 - RNA, 22 nt, synthetic construct
  source 1..22: mol_type = other RNA
aggcagaagataaccatagtag

SEQ ID NO: 13252 - RNA, 22 nt, synthetic construct
  source 1..22: mol_type = other RNA
aggcaggcgtttttcttaaaaa

SEQ ID NO: 13253 - RNA, 22 nt, synthetic construct
  source 1..22: mol_type = other RNA
aggcatgcgctcccgcaaaagc

SEQ ID NO: 13254 - RNA, 22 nt, synthetic construct
  source 1..22: mol_type = other RNA
aggccaaaggtctcccctgctc

SEQ ID NO: 13255 - RNA, 22 nt, synthetic construct
  source 1..22: mol_type = other RNA
aggccccgcgaaagagcggaag

SEQ ID NO: 13256 - RNA, 22 nt, synthetic construct
  source 1..22: mol_type = other RNA
aggccgaggcgggaggatggct

SEQ ID NO: 13257 - RNA, 22 nt, synthetic construct
  source 1..22: mol_type = other RNA
aggcgcccgctaagttcgcatg

SEQ ID NO: 13258 - RNA, 22 nt, synthetic construct
  source 1..22: mol_type = other RNA
aggcgcggcgctgaggtttgtg

SEQ ID NO: 13259 - RNA, 22 nt, synthetic construct
  source 1..22: mol_type = other RNA
aggcgggaggatctcttgagct

SEQ ID NO: 13260 - RNA, 22 nt, synthetic construct
  source 1..22: mol_type = other RNA
aggcgggaggatggcttgaggt

SEQ ID NO: 13261 - RNA, 22 nt, synthetic construct
  source 1..22: mol_type = other RNA
aggcgtaagctaccacgcccaa

SEQ ID NO: 13262 - RNA, 22 nt, synthetic construct
  source 1..22: mol_type = other RNA
aggcgtcgcccgggtaagcctg

SEQ ID NO: 13263 - RNA, 22 nt, synthetic construct
  source 1..22: mol_type = other RNA
aggctcgtcccaaaggcgcggc

SEQ ID NO: 13264 - RNA, 22 nt, synthetic construct
  source 1..22: mol_type = other RNA
aggctggtctcaactacggacc

SEQ ID NO: 13265 - RNA, 22 nt, synthetic construct
  source 1..22: mol_type = other RNA
aggcttacccgggcgacgcctc

SEQ ID NO: 13266 - RNA, 22 nt, synthetic construct
  source 1..22: mol_type = other RNA
aggcttgacttcaatctcgatt

SEQ ID NO: 13267 - RNA, 22 nt, synthetic construct
  source 1..22: mol_type = other RNA
aggcttttgagctatcatggcg

SEQ ID NO: 13268 - RNA, 22 nt, synthetic construct
  source 1..22: mol_type = other RNA
agggaagcagagccgcagcaga

SEQ ID NO: 13269 - RNA, 22 nt, synthetic construct
  source 1..22: mol_type = other RNA
agggaagtcacggagcgagaga

SEQ ID NO: 13270 - RNA, 22 nt, synthetic construct
  source 1..22: mol_type = other RNA
agggaggccgaggcgggaggat

SEQ ID NO: 13271 - RNA, 22 nt, synthetic construct
  source 1..22: mol_type = other RNA
agggccacagagggtgcagagc

SEQ ID NO: 13272 - RNA, 22 nt, synthetic construct
  source 1..22: mol_type = other RNA
agggcccatgccgcccagtttg

SEQ ID NO: 13273 - RNA, 22 nt, synthetic construct
  source 1..22: mol_type = other RNA
agggcgtcgataagcgtcagag

SEQ ID NO: 13274 - RNA, 22 nt, synthetic construct
  source 1..22: mol_type = other RNA
agggctggatctcggggaagcg

SEQ ID NO: 13275 - RNA, 22 nt, synthetic construct
  source 1..22: mol_type = other RNA
agggcttcctctttggctcttt

SEQ ID NO: 13276 - RNA, 22 nt, synthetic construct
  source 1..22: mol_type = other RNA
agggcttttgcgggagcgcatg

SEQ ID NO: 13277 - RNA, 22 nt, synthetic construct
  source 1..22: mol_type = other RNA
aggggagacctttggcctacgg

SEQ ID NO: 13278 - RNA, 22 nt, synthetic construct
  source 1..22: mol_type = other RNA
aggggataaatggcagcaatcg

SEQ ID NO: 13279 - RNA, 22 nt, synthetic construct
  source 1..22: mol_type = other RNA
aggggcaagtagcgcgcgtccc

SEQ ID NO: 13280 - RNA, 22 nt, synthetic construct
  source 1..22: mol_type = other RNA
aggggcgcttggggtctggggg

SEQ ID NO: 13281 - RNA, 22 nt, synthetic construct
  source 1..22: mol_type = other RNA
agggggttgggcgtggtagctt

SEQ ID NO: 13282 - RNA, 22 nt, synthetic construct
  source 1..22: mol_type = other RNA
agggtcgggacaaagtttaggg

SEQ ID NO: 13283 - RNA, 22 nt, synthetic construct
  source 1..22: mol_type = other RNA
agggtgcagagcgggagaggaa

SEQ ID NO: 13284 - RNA, 22 nt, synthetic construct
  source 1..22: mol_type = other RNA
agggtttctcttccgctctttc

SEQ ID NO: 13285 - RNA, 22 nt, synthetic construct
  source 1..22: mol_type = other RNA
aggtccgtagttgagaccagcc

SEQ ID NO: 13286 - RNA, 22 nt, synthetic construct
  source 1..22: mol_type = other RNA
aggtctcccctgctccccgccg

SEQ ID NO: 13287 - RNA, 22 nt, synthetic construct
  source 1..22: mol_type = other RNA
aggtgctaggacatgcgaactt

SEQ ID NO: 13288 - RNA, 22 nt, synthetic construct
  source 1..22: mol_type = other RNA
aggttgggggagggtttctctt

SEQ ID NO: 13289 - RNA, 22 nt, synthetic construct
  source 1..22: mol_type = other RNA
aggtttgtgaacgcgtggaggg

SEQ ID NO: 13290 - RNA, 22 nt, synthetic construct
  source 1..22: mol_type = other RNA
agtaagaggcacagtacatctt

SEQ ID NO: 13291 - RNA, 22 nt, synthetic construct
  source 1..22: mol_type = other RNA
agtacatcttggaaacaaccag

SEQ ID NO: 13292 - RNA, 22 nt, synthetic construct
  source 1..22: mol_type = other RNA
agtagcgcgcgtcccgggtgcg

SEQ ID NO: 13293 - RNA, 22 nt, synthetic construct
  source 1..22: mol_type = other RNA
agtagttatctatggcggaaga

SEQ ID NO: 13294 - RNA, 22 nt, synthetic construct
  source 1..22: mol_type = other RNA
agtcaagcctaaccagggcttt

SEQ ID NO: 13295 - RNA, 22 nt, synthetic construct
  source 1..22: mol_type = other RNA
agtcacggagcgagagagcaca

SEQ ID NO: 13296 - RNA, 22 nt, synthetic construct
  source 1..22: mol_type = other RNA
agtccacagctctccagtctaa

SEQ ID NO: 13297 - RNA, 22 nt, synthetic construct
  source 1..22: mol_type = other RNA
agtccagggctggatctcgggg

SEQ ID NO: 13298 - RNA, 22 nt, synthetic construct
  source 1..22: mol_type = other RNA
agtccttggcacacagaaagat

SEQ ID NO: 13299 - RNA, 22 nt, synthetic construct
  source 1..22: mol_type = other RNA
agtctaagggaagcagagccgc

SEQ ID NO: 13300 - RNA, 22 nt, synthetic construct
  source 1..22: mol_type = other RNA
agtctctcctaccctcccgctc

SEQ ID NO: 13301 - RNA, 22 nt, synthetic construct
  source 1..22: mol_type = other RNA
agtgacatgtgatgggaacaaa

SEQ ID NO: 13302 - RNA, 22 nt, synthetic construct
  source 1..22: mol_type = other RNA
agtgcactccagcgtgggcaac

SEQ ID NO: 13303 - RNA, 22 nt, synthetic construct
  source 1..22: mol_type = other RNA
agtgcactggcgccatgatagc

SEQ ID NO: 13304 - RNA, 22 nt, synthetic construct
  source 1..22: mol_type = other RNA
agtggggaagggggtgcgcacc

SEQ ID NO: 13305 - RNA, 22 nt, synthetic construct
  source 1..22: mol_type = other RNA
agtgggggacgggtaggctcgt

SEQ ID NO: 13306 - RNA, 22 nt, synthetic construct
  source 1..22: mol_type = other RNA
agttaattattcgaaaccgctt

SEQ ID NO: 13307 - RNA, 22 nt, synthetic construct
  source 1..22: mol_type = other RNA
agttatctatggcggaagataa

SEQ ID NO: 13308 - RNA, 22 nt, synthetic construct
  source 1..22: mol_type = other RNA
agttatcttccgccatagataa

SEQ ID NO: 13309 - RNA, 22 nt, synthetic construct
  source 1..22: mol_type = other RNA
agttcgcatgtcctagcacctc

SEQ ID NO: 13310 - RNA, 22 nt, synthetic construct
  source 1..22: mol_type = other RNA
agttctccttggtggcccgccg

SEQ ID NO: 13311 - RNA, 22 nt, synthetic construct
  source 1..22: mol_type = other RNA
agtttagggcgtcgataagcgt

SEQ ID NO: 13312 - RNA, 22 nt, synthetic construct
  source 1..22: mol_type = other RNA
agtttcttaaaatctcggtgcc

SEQ ID NO: 13313 - RNA, 22 nt, synthetic construct
  source 1..22: mol_type = other RNA
agtttcttcatctgtgagaggc

SEQ ID NO: 13314 - RNA, 22 nt, synthetic construct
  source 1..22: mol_type = other RNA
agtttgctctggagaatctcac

SEQ ID NO: 13315 - RNA, 22 nt, synthetic construct
  source 1..22: mol_type = other RNA
ataaagtccttggcacacagaa

SEQ ID NO: 13316 - RNA, 22 nt, synthetic construct
  source 1..22: mol_type = other RNA
ataaatggcagcaatcgagatt

SEQ ID NO: 13317 - RNA, 22 nt, synthetic construct
  source 1..22: mol_type = other RNA
ataacaaaaattagccgggtgt

SEQ ID NO: 13318 - RNA, 22 nt, synthetic construct
  source 1..22: mol_type = other RNA
ataaccatagtagttatctatg

SEQ ID NO: 13319 - RNA, 22 nt, synthetic construct
  source 1..22: mol_type = other RNA
ataacgggtagttcttataatt

SEQ ID NO: 13320 - RNA, 22 nt, synthetic construct
  source 1..22: mol_type = other RNA
ataactactatggttatcttct

SEQ ID NO: 13321 - RNA, 22 nt, synthetic construct
  source 1..22: mol_type = other RNA
ataagaactacccgttattgac

SEQ ID NO: 13322 - RNA, 22 nt, synthetic construct
  source 1..22: mol_type = other RNA
ataagcgtcagagcgccgaggt

SEQ ID NO: 13323 - RNA, 22 nt, synthetic construct
  source 1..22: mol_type = other RNA
ataagttaattattcgaaaccg

SEQ ID NO: 13324 - RNA, 22 nt, synthetic construct
  source 1..22: mol_type = other RNA
ataataacaaaaattagccggg

SEQ ID NO: 13325 - RNA, 22 nt, synthetic construct
  source 1..22: mol_type = other RNA
atacaaagcggtttcgaataat

SEQ ID NO: 13326 - RNA, 22 nt, synthetic construct
  source 1..22: mol_type = other RNA
atagacccagaggtgctaggac

SEQ ID NO: 13327 - RNA, 22 nt, synthetic construct
  source 1..22: mol_type = other RNA
atagataactactatggttatc

SEQ ID NO: 13328 - RNA, 22 nt, synthetic construct
  source 1..22: mol_type = other RNA
atagctcaaaagcctaagctca

SEQ ID NO: 13329 - RNA, 22 nt, synthetic construct
  source 1..22: mol_type = other RNA
atagtagttatctatggcggaa

SEQ ID NO: 13330 - RNA, 22 nt, synthetic construct
  source 1..22: mol_type = other RNA
atcacagccaagcattctacaa

SEQ ID NO: 13331 - RNA, 22 nt, synthetic construct
  source 1..22: mol_type = other RNA
atcatggcgccagtgcactcca

SEQ ID NO: 13332 - RNA, 22 nt, synthetic construct
  source 1..22: mol_type = other RNA
atccagccctggactagcccca

SEQ ID NO: 13333 - RNA, 22 nt, synthetic construct
  source 1..22: mol_type = other RNA
atcccctgtgtaattaagtttc

SEQ ID NO: 13334 - RNA, 22 nt, synthetic construct
  source 1..22: mol_type = other RNA
atcctcccgcctcagccaccgg

SEQ ID NO: 13335 - RNA, 22 nt, synthetic construct
  source 1..22: mol_type = other RNA
atcgacgccctaaactttgtcc

SEQ ID NO: 13336 - RNA, 22 nt, synthetic construct
  source 1..22: mol_type = other RNA
atcgagattgaagtcaagccta

SEQ ID NO: 13337 - RNA, 22 nt, synthetic construct
  source 1..22: mol_type = other RNA
atctatggcggaagataactgt

SEQ ID NO: 13338 - RNA, 22 nt, synthetic construct
  source 1..22: mol_type = other RNA
atctcacgcagaaggcaggcgt

SEQ ID NO: 13339 - RNA, 22 nt, synthetic construct
  source 1..22: mol_type = other RNA
atctcgattgctgccatttatc

SEQ ID NO: 13340 - RNA, 22 nt, synthetic construct
  source 1..22: mol_type = other RNA
atctcggggaagcggcggggtg

SEQ ID NO: 13341 - RNA, 22 nt, synthetic construct
  source 1..22: mol_type = other RNA
atctcggtgccttagtttcttc

SEQ ID NO: 13342 - RNA, 22 nt, synthetic construct
  source 1..22: mol_type = other RNA
atctcttgagcttaggcttttg

SEQ ID NO: 13343 - RNA, 22 nt, synthetic construct
  source 1..22: mol_type = other RNA
atctgtgagaggcagaagataa

SEQ ID NO: 13344 - RNA, 22 nt, synthetic construct
  source 1..22: mol_type = other RNA
atcttccgccatagataactac

SEQ ID NO: 13345 - RNA, 22 nt, synthetic construct
  source 1..22: mol_type = other RNA
atcttctgcctctcacagatga

SEQ ID NO: 13346 - RNA, 22 nt, synthetic construct
  source 1..22: mol_type = other RNA
atcttggaaacaaccaggcaaa

SEQ ID NO: 13347 - RNA, 22 nt, synthetic construct
  source 1..22: mol_type = other RNA
atctttctgtgtgccaaggact

SEQ ID NO: 13348 - RNA, 22 nt, synthetic construct
  source 1..22: mol_type = other RNA
atgaagaaactaaggcaccgag

SEQ ID NO: 13349 - RNA, 22 nt, synthetic construct
  source 1..22: mol_type = other RNA
atgacgcaaagcacataaagtc

SEQ ID NO: 13350 - RNA, 22 nt, synthetic construct
  source 1..22: mol_type = other RNA
atgagggggttgggcgtggtag

SEQ ID NO: 13351 - RNA, 22 nt, synthetic construct
  source 1..22: mol_type = other RNA
atgatagctcaaaagcctaagc

SEQ ID NO: 13352 - RNA, 22 nt, synthetic construct
  source 1..22: mol_type = other RNA
atgcacgaattacagccaaaag

SEQ ID NO: 13353 - RNA, 22 nt, synthetic construct
  source 1..22: mol_type = other RNA
atgccgcccagtttgctctgga

SEQ ID NO: 13354 - RNA, 22 nt, synthetic construct
  source 1..22: mol_type = other RNA
atgccttttggctgtaattcgt

SEQ ID NO: 13355 - RNA, 22 nt, synthetic construct
  source 1..22: mol_type = other RNA
atgcgaacttagcgggcgccta

SEQ ID NO: 13356 - RNA, 22 nt, synthetic construct
  source 1..22: mol_type = other RNA
atgcgctcccgcaaaagccctg

SEQ ID NO: 13357 - RNA, 22 nt, synthetic construct
  source 1..22: mol_type = other RNA
atgcttggctgtgatacaaagc

SEQ ID NO: 13358 - RNA, 22 nt, synthetic construct
  source 1..22: mol_type = other RNA
atggcagcaatcgagattgaag

SEQ ID NO: 13359 - RNA, 22 nt, synthetic construct
  source 1..22: mol_type = other RNA
atggcgccagtgcactccagcg

SEQ ID NO: 13360 - RNA, 22 nt, synthetic construct
  source 1..22: mol_type = other RNA
atggcggaagataactgttttc

SEQ ID NO: 13361 - RNA, 22 nt, synthetic construct
  source 1..22: mol_type = other RNA
atggcttgaggtccgtagttga

SEQ ID NO: 13362 - RNA, 22 nt, synthetic construct
  source 1..22: mol_type = other RNA
atgggccctgtggtcttttcgt

SEQ ID NO: 13363 - RNA, 22 nt, synthetic construct
  source 1..22: mol_type = other RNA
atggtgaagcctggtctctaca

SEQ ID NO: 13364 - RNA, 22 nt, synthetic construct
  source 1..22: mol_type = other RNA
atggttatcttctgcctctcac

SEQ ID NO: 13365 - RNA, 22 nt, synthetic construct
  source 1..22: mol_type = other RNA
atgtactgtgcctcttactttc

SEQ ID NO: 13366 - RNA, 22 nt, synthetic construct
  source 1..22: mol_type = other RNA
atgtcaataacgggtagttctt

SEQ ID NO: 13367 - RNA, 22 nt, synthetic construct
  source 1..22: mol_type = other RNA
atgtcctagcacctctgggtct

SEQ ID NO: 13368 - RNA, 22 nt, synthetic construct
  source 1..22: mol_type = other RNA
atgtgatgggaacaaataagtt

SEQ ID NO: 13369 - RNA, 22 nt, synthetic construct
  source 1..22: mol_type = other RNA
atgtgctttgcgtcatttaatt

SEQ ID NO: 13370 - RNA, 22 nt, synthetic construct
  source 1..22: mol_type = other RNA
atgtggggccacaccgtgggga

SEQ ID NO: 13371 - RNA, 22 nt, synthetic construct
  source 1..22: mol_type = other RNA
atgttggccaggctggtctcaa

SEQ ID NO: 13372 - RNA, 22 nt, synthetic construct
  source 1..22: mol_type = other RNA
atgttttcaaaaccgaaagtaa

SEQ ID NO: 13373 - RNA, 22 nt, synthetic construct
  source 1..22: mol_type = other RNA
attaaatgacgcaaagcacata

SEQ ID NO: 13374 - RNA, 22 nt, synthetic construct
  source 1..22: mol_type = other RNA
attaacttatttgttcccatca

SEQ ID NO: 13375 - RNA, 22 nt, synthetic construct
  source 1..22: mol_type = other RNA
attaagtttcttaaaatctcgg

SEQ ID NO: 13376 - RNA, 22 nt, synthetic construct
  source 1..22: mol_type = other RNA
attacacaggggataaatggca

SEQ ID NO: 13377 - RNA, 22 nt, synthetic construct
  source 1..22: mol_type = other RNA
attacagccaaaaggcatgcgc

SEQ ID NO: 13378 - RNA, 22 nt, synthetic construct
  source 1..22: mol_type = other RNA
attacaggcgtaagctaccacg

SEQ ID NO: 13379 - RNA, 22 nt, synthetic construct
  source 1..22: mol_type = other RNA
attagccgggtgtggtggctcg

SEQ ID NO: 13380 - RNA, 22 nt, synthetic construct
  source 1..22: mol_type = other RNA
attataagaactacccgttatt

SEQ ID NO: 13381 - RNA, 22 nt, synthetic construct
  source 1..22: mol_type = other RNA
attattcgaaaccgctttgtat

SEQ ID NO: 13382 - RNA, 22 nt, synthetic construct
  source 1..22: mol_type = other RNA
attattttttgtagagaccagg

SEQ ID NO: 13383 - RNA, 22 nt, synthetic construct
  source 1..22: mol_type = other RNA
attcgaaaccgctttgtatcac

SEQ ID NO: 13384 - RNA, 22 nt, synthetic construct
  source 1..22: mol_type = other RNA
attctacaaacgtcgcgtgctg

SEQ ID NO: 13385 - RNA, 22 nt, synthetic construct
  source 1..22: mol_type = other RNA
attctccagagcaaactgggcg

SEQ ID NO: 13386 - RNA, 22 nt, synthetic construct
  source 1..22: mol_type = other RNA
attgaagtcaagcctaaccagg

SEQ ID NO: 13387 - RNA, 22 nt, synthetic construct
  source 1..22: mol_type = other RNA
attgacatctttctgtgtgcca

SEQ ID NO: 13388 - RNA, 22 nt, synthetic construct
  source 1..22: mol_type = other RNA
attgctgccatttatcccctgt

SEQ ID NO: 13389 - RNA, 22 nt, synthetic construct
  source 1..22: mol_type = other RNA
atttatcccctgtgtaattaag

SEQ ID NO: 13390 - RNA, 22 nt, synthetic construct
  source 1..22: mol_type = other RNA
atttgttcccatcacatgtcac

SEQ ID NO: 13391 - RNA, 22 nt, synthetic construct
  source 1..22: mol_type = other RNA
attttgaaaacagttatcttcc

SEQ ID NO: 13392 - RNA, 22 nt, synthetic construct
  source 1..22: mol_type = other RNA
attttttgtagagaccaggctt

SEQ ID NO: 13393 - RNA, 22 nt, synthetic construct
  source 1..22: mol_type = other RNA
caaaaccgaaagtaagaggcac

SEQ ID NO: 13394 - RNA, 22 nt, synthetic construct
  source 1..22: mol_type = other RNA
caaaagccctggttaggcttga

SEQ ID NO: 13395 - RNA, 22 nt, synthetic construct
  source 1..22: mol_type = other RNA
caaaagcctaagctcaagagat

SEQ ID NO: 13396 - RNA, 22 nt, synthetic construct
  source 1..22: mol_type = other RNA
caaaaggcatgcgctcccgcaa

SEQ ID NO: 13397 - RNA, 22 nt, synthetic construct
  source 1..22: mol_type = other RNA
caaaattaaatgacgcaaagca

SEQ ID NO: 13398 - RNA, 22 nt, synthetic construct
  source 1..22: mol_type = other RNA
caaacctcagcgccgcgccttt

SEQ ID NO: 13399 - RNA, 22 nt, synthetic construct
  source 1..22: mol_type = other RNA
caaacgtcgcgtgctgtttcct

SEQ ID NO: 13400 - RNA, 22 nt, synthetic construct
  source 1..22: mol_type = other RNA
caaactgggcggcatgggccct

SEQ ID NO: 13401 - RNA, 22 nt, synthetic construct
  source 1..22: mol_type = other RNA
caaagagccaaagaggaagccc

SEQ ID NO: 13402 - RNA, 22 nt, synthetic construct
  source 1..22: mol_type = other RNA
caaagaggaagccctctgtacg

SEQ ID NO: 13403 - RNA, 22 nt, synthetic construct
  source 1..22: mol_type = other RNA
caaagcacataaagtccttggc

SEQ ID NO: 13404 - RNA, 22 nt, synthetic construct
  source 1..22: mol_type = other RNA
caaagcggtttcgaataattaa

SEQ ID NO: 13405 - RNA, 22 nt, synthetic construct
  source 1..22: mol_type = other RNA
caaaggcgcggcgctgaggttt

SEQ ID NO: 13406 - RNA, 22 nt, synthetic construct
  source 1..22: mol_type = other RNA
caaaggtctcccctgctccccg

SEQ ID NO: 13407 - RNA, 22 nt, synthetic construct
  source 1..22: mol_type = other RNA
caaagtttagggcgtcgataag

SEQ ID NO: 13408 - RNA, 22 nt, synthetic construct
  source 1..22: mol_type = other RNA
caacatggtgaagcctggtctc

SEQ ID NO: 13409 - RNA, 22 nt, synthetic construct
  source 1..22: mol_type = other RNA
caaccaggcaaagagccaaaga

SEQ ID NO: 13410 - RNA, 22 nt, synthetic construct
  source 1..22: mol_type = other RNA
caaccccctcatgttttcaaaa

SEQ ID NO: 13411 - RNA, 22 nt, synthetic construct
  source 1..22: mol_type = other RNA
caacctcggcgctctgacgctt

SEQ ID NO: 13412 - RNA, 22 nt, synthetic construct
  source 1..22: mol_type = other RNA
caactacggacctcaagccatc

SEQ ID NO: 13413 - RNA, 22 nt, synthetic construct
  source 1..22: mol_type = other RNA
caagagatcctcccgcctcagc

SEQ ID NO: 13414 - RNA, 22 nt, synthetic construct
  source 1..22: mol_type = other RNA
caagatgtactgtgcctcttac

SEQ ID NO: 13415 - RNA, 22 nt, synthetic construct
  source 1..22: mol_type = other RNA
caagcattctacaaacgtcgcg

SEQ ID NO: 13416 - RNA, 22 nt, synthetic construct
  source 1..22: mol_type = other RNA
caagccatcctcccgcctcggc

SEQ ID NO: 13417 - RNA, 22 nt, synthetic construct
  source 1..22: mol_type = other RNA
caagcctaaccagggcttttgc

SEQ ID NO: 13418 - RNA, 22 nt, synthetic construct
  source 1..22: mol_type = other RNA
caagcgcccctccacgcgttca

SEQ ID NO: 13419 - RNA, 22 nt, synthetic construct
  source 1..22: mol_type = other RNA
caaggactttatgtgctttgcg

SEQ ID NO: 13420 - RNA, 22 nt, synthetic construct
  source 1..22: mol_type = other RNA
caaggagaacttggagaaggga

SEQ ID NO: 13421 - RNA, 22 nt, synthetic construct
  source 1..22: mol_type = other RNA
caagtagcgcgcgtcccgggtg

SEQ ID NO: 13422 - RNA, 22 nt, synthetic construct
  source 1..22: mol_type = other RNA
caagttctccttggtggcccgc

SEQ ID NO: 13423 - RNA, 22 nt, synthetic construct
  source 1..22: mol_type = other RNA
caataacgggtagttcttataa

SEQ ID NO: 13424 - RNA, 22 nt, synthetic construct
  source 1..22: mol_type = other RNA
caatcgagattgaagtcaagcc

SEQ ID NO: 13425 - RNA, 22 nt, synthetic construct
  source 1..22: mol_type = other RNA
caatctcgattgctgccattta

SEQ ID NO: 13426 - RNA, 22 nt, synthetic construct
  source 1..22: mol_type = other RNA
cacaaacctcagcgccgcgcct

SEQ ID NO: 13427 - RNA, 22 nt, synthetic construct
  source 1..22: mol_type = other RNA
cacacagaaagatgtcaataac

SEQ ID NO: 13428 - RNA, 22 nt, synthetic construct
  source 1..22: mol_type = other RNA
cacacccggctaatttttgtta

SEQ ID NO: 13429 - RNA, 22 nt, synthetic construct
  source 1..22: mol_type = other RNA
cacaccgtggggaggaaacagc

SEQ ID NO: 13430 - RNA, 22 nt, synthetic construct
  source 1..22: mol_type = other RNA
cacagaaagatgtcaataacgg

SEQ ID NO: 13431 - RNA, 22 nt, synthetic construct
  source 1..22: mol_type = other RNA
cacagagggtgcagagcgggag

SEQ ID NO: 13432 - RNA, 22 nt, synthetic construct
  source 1..22: mol_type = other RNA
cacagatgaagaaactaaggca

SEQ ID NO: 13433 - RNA, 22 nt, synthetic construct
  source 1..22: mol_type = other RNA
cacagccaagcattctacaaac

SEQ ID NO: 13434 - RNA, 22 nt, synthetic construct
  source 1..22: mol_type = other RNA
cacagcgagggccacagagggt

SEQ ID NO: 13435 - RNA, 22 nt, synthetic construct
  source 1..22: mol_type = other RNA
cacagctctccagtctaaggga

SEQ ID NO: 13436 - RNA, 22 nt, synthetic construct
  source 1..22: mol_type = other RNA
cacaggcacgagccaccacacc

SEQ ID NO: 13437 - RNA, 22 nt, synthetic construct
  source 1..22: mol_type = other RNA
cacagggcccatgccgcccagt

SEQ ID NO: 13438 - RNA, 22 nt, synthetic construct
  source 1..22: mol_type = other RNA
cacaggggataaatggcagcaa

SEQ ID NO: 13439 - RNA, 22 nt, synthetic construct
  source 1..22: mol_type = other RNA
cacagtacatcttggaaacaac

SEQ ID NO: 13440 - RNA, 22 nt, synthetic construct
  source 1..22: mol_type = other RNA
cacataaagtccttggcacaca

SEQ ID NO: 13441 - RNA, 22 nt, synthetic construct
  source 1..22: mol_type = other RNA
cacatagacccagaggtgctag

SEQ ID NO: 13442 - RNA, 22 nt, synthetic construct
  source 1..22: mol_type = other RNA
caccaaggagaacttggagaag

SEQ ID NO: 13443 - RNA, 22 nt, synthetic construct
  source 1..22: mol_type = other RNA
caccacacccggctaatttttg

SEQ ID NO: 13444 - RNA, 22 nt, synthetic construct
  source 1..22: mol_type = other RNA
cacccccttccccactcccagg

SEQ ID NO: 13445 - RNA, 22 nt, synthetic construct
  source 1..22: mol_type = other RNA
caccccgccgcttccccgagat

SEQ ID NO: 13446 - RNA, 22 nt, synthetic construct
  source 1..22: mol_type = other RNA
cacccggctaatttttgttatt

SEQ ID NO: 13447 - RNA, 22 nt, synthetic construct
  source 1..22: mol_type = other RNA
cacccgggacgcgcgctacttg

SEQ ID NO: 13448 - RNA, 22 nt, synthetic construct
  source 1..22: mol_type = other RNA
caccctctgtggccctcgctgt

SEQ ID NO: 13449 - RNA, 22 nt, synthetic construct
  source 1..22: mol_type = other RNA
caccgagattttaagaaactta

SEQ ID NO: 13450 - RNA, 22 nt, synthetic construct
  source 1..22: mol_type = other RNA
caccggagcagctgggaccaca

SEQ ID NO: 13451 - RNA, 22 nt, synthetic construct
  source 1..22: mol_type = other RNA
caccgtggggaggaaacagcac

SEQ ID NO: 13452 - RNA, 22 nt, synthetic construct
  source 1..22: mol_type = other RNA
cacctctgggtctatgtggggc

SEQ ID NO: 13453 - RNA, 22 nt, synthetic construct
  source 1..22: mol_type = other RNA
cacgaattacagccaaaaggca

SEQ ID NO: 13454 - RNA, 22 nt, synthetic construct
  source 1..22: mol_type = other RNA
cacgcagaaggcaggcgttttt

SEQ ID NO: 13455 - RNA, 22 nt, synthetic construct
  source 1..22: mol_type = other RNA
cacgcccaaccccctcatgttt

SEQ ID NO: 13456 - RNA, 22 nt, synthetic construct
  source 1..22: mol_type = other RNA
cacgcgacgtttgtagaatgct

SEQ ID NO: 13457 - RNA, 22 nt, synthetic construct
  source 1..22: mol_type = other RNA
cacgcgttcacaaacctcagcg

SEQ ID NO: 13458 - RNA, 22 nt, synthetic construct
  source 1..22: mol_type = other RNA
cacgctggagtgcactggcgcc

SEQ ID NO: 13459 - RNA, 22 nt, synthetic construct
  source 1..22: mol_type = other RNA
cacggagcgagagagcacagcg

SEQ ID NO: 13460 - RNA, 22 nt, synthetic construct
  source 1..22: mol_type = other RNA
cacggcgggccaccaaggagaa

SEQ ID NO: 13461 - RNA, 22 nt, synthetic construct
  source 1..22: mol_type = other RNA
cacggtgtggccccacatagac

SEQ ID NO: 13462 - RNA, 22 nt, synthetic construct
  source 1..22: mol_type = other RNA
cactccagctgcgctgggggag

SEQ ID NO: 13463 - RNA, 22 nt, synthetic construct
  source 1..22: mol_type = other RNA
cactggcgccatgatagctcaa

SEQ ID NO: 13464 - RNA, 22 nt, synthetic construct
  source 1..22: mol_type = other RNA
cacttagggaggccgaggcggg

SEQ ID NO: 13465 - RNA, 22 nt, synthetic construct
  source 1..22: mol_type = other RNA
cagaaagatgtcaataacgggt

SEQ ID NO: 13466 - RNA, 22 nt, synthetic construct
  source 1..22: mol_type = other RNA
cagaagataaccatagtagtta

SEQ ID NO: 13467 - RNA, 22 nt, synthetic construct
  source 1..22: mol_type = other RNA
cagaaggcaggcgtttttctta

SEQ ID NO: 13468 - RNA, 22 nt, synthetic construct
  source 1..22: mol_type = other RNA
cagacaggcttacccgggcgac

SEQ ID NO: 13469 - RNA, 22 nt, synthetic construct
  source 1..22: mol_type = other RNA
cagaccccaagcgcccctccac

SEQ ID NO: 13470 - RNA, 22 nt, synthetic construct
  source 1..22: mol_type = other RNA
cagagcaaactgggcggcatgg

SEQ ID NO: 13471 - RNA, 22 nt, synthetic construct
  source 1..22: mol_type = other RNA
cagagccgcagcagacaggctt

SEQ ID NO: 13472 - RNA, 22 nt, synthetic construct
  source 1..22: mol_type = other RNA
cagagcgccgaggttgggggag

SEQ ID NO: 13473 - RNA, 22 nt, synthetic construct
  source 1..22: mol_type = other RNA
cagagcgggagaggaaggacca

SEQ ID NO: 13474 - RNA, 22 nt, synthetic construct
  source 1..22: mol_type = other RNA
cagaggccccgcgaaagagcgg

SEQ ID NO: 13475 - RNA, 22 nt, synthetic construct
  source 1..22: mol_type = other RNA
cagagggcttcctctttggctc

SEQ ID NO: 13476 - RNA, 22 nt, synthetic construct
  source 1..22: mol_type = other RNA
cagagggtgcagagcgggagag

SEQ ID NO: 13477 - RNA, 22 nt, synthetic construct
  source 1..22: mol_type = other RNA
cagaggtgctaggacatgcgaa

SEQ ID NO: 13478 - RNA, 22 nt, synthetic construct
  source 1..22: mol_type = other RNA
cagatgaagaaactaaggcacc

SEQ ID NO: 13479 - RNA, 22 nt, synthetic construct
  source 1..22: mol_type = other RNA
cagcaatcgagattgaagtcaa

SEQ ID NO: 13480 - RNA, 22 nt, synthetic construct
  source 1..22: mol_type = other RNA
cagcacgcgacgtttgtagaat

SEQ ID NO: 13481 - RNA, 22 nt, synthetic construct
  source 1..22: mol_type = other RNA
cagcagacaggcttacccgggc

SEQ ID NO: 13482 - RNA, 22 nt, synthetic construct
  source 1..22: mol_type = other RNA
cagccaaaaggcatgcgctccc

SEQ ID NO: 13483 - RNA, 22 nt, synthetic construct
  source 1..22: mol_type = other RNA
cagccaagcattctacaaacgt

SEQ ID NO: 13484 - RNA, 22 nt, synthetic construct
  source 1..22: mol_type = other RNA
cagccaccggagcagctgggac

SEQ ID NO: 13485 - RNA, 22 nt, synthetic construct
  source 1..22: mol_type = other RNA
cagccctggactagccccacgg

SEQ ID NO: 13486 - RNA, 22 nt, synthetic construct
  source 1..22: mol_type = other RNA
cagcgagggccacagagggtgc

SEQ ID NO: 13487 - RNA, 22 nt, synthetic construct
  source 1..22: mol_type = other RNA
cagcgcagctggagtgggggac

SEQ ID NO: 13488 - RNA, 22 nt, synthetic construct
  source 1..22: mol_type = other RNA
cagcgccgcgcctttgggacga

SEQ ID NO: 13489 - RNA, 22 nt, synthetic construct
  source 1..22: mol_type = other RNA
cagctctccagtctaagggaag

SEQ ID NO: 13490 - RNA, 22 nt, synthetic construct
  source 1..22: mol_type = other RNA
cagctgcgctgggggagccaga

SEQ ID NO: 13491 - RNA, 22 nt, synthetic construct
  source 1..22: mol_type = other RNA
cagctgctccggtggctgaggc

SEQ ID NO: 13492 - RNA, 22 nt, synthetic construct
  source 1..22: mol_type = other RNA
cagctggagtgggggacgggta

SEQ ID NO: 13493 - RNA, 22 nt, synthetic construct
  source 1..22: mol_type = other RNA
cagctgggaccacaggcacgag

SEQ ID NO: 13494 - RNA, 22 nt, synthetic construct
  source 1..22: mol_type = other RNA
caggcaaagagccaaagaggaa

SEQ ID NO: 13495 - RNA, 22 nt, synthetic construct
  source 1..22: mol_type = other RNA
caggcgtaagctaccacgccca

SEQ ID NO: 13496 - RNA, 22 nt, synthetic construct
  source 1..22: mol_type = other RNA
caggctggtctcaactacggac

SEQ ID NO: 13497 - RNA, 22 nt, synthetic construct
  source 1..22: mol_type = other RNA
caggcttacccgggcgacgcct

SEQ ID NO: 13498 - RNA, 22 nt, synthetic construct
  source 1..22: mol_type = other RNA
cagggcccatgccgcccagttt

SEQ ID NO: 13499 - RNA, 22 nt, synthetic construct
  source 1..22: mol_type = other RNA
cagggctggatctcggggaagc

SEQ ID NO: 13500 - RNA, 22 nt, synthetic construct
  source 1..22: mol_type = other RNA
cagggcttttgcgggagcgcat

SEQ ID NO: 13501 - RNA, 22 nt, synthetic construct
  source 1..22: mol_type = other RNA
caggggagacctttggcctacg

SEQ ID NO: 13502 - RNA, 22 nt, synthetic construct
  source 1..22: mol_type = other RNA
caggggataaatggcagcaatc

SEQ ID NO: 13503 - RNA, 22 nt, synthetic construct
  source 1..22: mol_type = other RNA
cagtacatcttggaaacaacca

SEQ ID NO: 13504 - RNA, 22 nt, synthetic construct
  source 1..22: mol_type = other RNA
cagtctaagggaagcagagccg

SEQ ID NO: 13505 - RNA, 22 nt, synthetic construct
  source 1..22: mol_type = other RNA
cagtgcactccagcgtgggcaa

SEQ ID NO: 13506 - RNA, 22 nt, synthetic construct
  source 1..22: mol_type = other RNA
cagttatcttccgccatagata

SEQ ID NO: 13507 - RNA, 22 nt, synthetic construct
  source 1..22: mol_type = other RNA
cagtttgctctggagaatctca

SEQ ID NO: 13508 - RNA, 22 nt, synthetic construct
  source 1..22: mol_type = other RNA
cataaagtccttggcacacaga

SEQ ID NO: 13509 - RNA, 22 nt, synthetic construct
  source 1..22: mol_type = other RNA
catagacccagaggtgctagga

SEQ ID NO: 13510 - RNA, 22 nt, synthetic construct
  source 1..22: mol_type = other RNA
catagataactactatggttat

SEQ ID NO: 13511 - RNA, 22 nt, synthetic construct
  source 1..22: mol_type = other RNA
catagtagttatctatggcgga

SEQ ID NO: 13512 - RNA, 22 nt, synthetic construct
  source 1..22: mol_type = other RNA
catcacatgtcacttttaaaaa

SEQ ID NO: 13513 - RNA, 22 nt, synthetic construct
  source 1..22: mol_type = other RNA
catcctcccgcctcggcctccc

SEQ ID NO: 13514 - RNA, 22 nt, synthetic construct
  source 1..22: mol_type = other RNA
catctgtgagaggcagaagata

SEQ ID NO: 13515 - RNA, 22 nt, synthetic construct
  source 1..22: mol_type = other RNA
catcttggaaacaaccaggcaa

SEQ ID NO: 13516 - RNA, 22 nt, synthetic construct
  source 1..22: mol_type = other RNA
catctttctgtgtgccaaggac

SEQ ID NO: 13517 - RNA, 22 nt, synthetic construct
  source 1..22: mol_type = other RNA
catgagggggttgggcgtggta

SEQ ID NO: 13518 - RNA, 22 nt, synthetic construct
  source 1..22: mol_type = other RNA
catgatagctcaaaagcctaag

SEQ ID NO: 13519 - RNA, 22 nt, synthetic construct
  source 1..22: mol_type = other RNA
catgccgcccagtttgctctgg

SEQ ID NO: 13520 - RNA, 22 nt, synthetic construct
  source 1..22: mol_type = other RNA
catgccttttggctgtaattcg

SEQ ID NO: 13521 - RNA, 22 nt, synthetic construct
  source 1..22: mol_type = other RNA
catgcgaacttagcgggcgcct

SEQ ID NO: 13522 - RNA, 22 nt, synthetic construct
  source 1..22: mol_type = other RNA
catgcgctcccgcaaaagccct

SEQ ID NO: 13523 - RNA, 22 nt, synthetic construct
  source 1..22: mol_type = other RNA
catggcgccagtgcactccagc

SEQ ID NO: 13524 - RNA, 22 nt, synthetic construct
  source 1..22: mol_type = other RNA
catgggccctgtggtcttttcg

SEQ ID NO: 13525 - RNA, 22 nt, synthetic construct
  source 1..22: mol_type = other RNA
catggtgaagcctggtctctac

SEQ ID NO: 13526 - RNA, 22 nt, synthetic construct
  source 1..22: mol_type = other RNA
catgtcctagcacctctgggtc

SEQ ID NO: 13527 - RNA, 22 nt, synthetic construct
  source 1..22: mol_type = other RNA
catgtgatgggaacaaataagt

SEQ ID NO: 13528 - RNA, 22 nt, synthetic construct
  source 1..22: mol_type = other RNA
catgttggccaggctggtctca

SEQ ID NO: 13529 - RNA, 22 nt, synthetic construct
  source 1..22: mol_type = other RNA
catgttttcaaaaccgaaagta

SEQ ID NO: 13530 - RNA, 22 nt, synthetic construct
  source 1..22: mol_type = other RNA
cattctacaaacgtcgcgtgct

SEQ ID NO: 13531 - RNA, 22 nt, synthetic construct
  source 1..22: mol_type = other RNA
catttatcccctgtgtaattaa

SEQ ID NO: 13532 - RNA, 22 nt, synthetic construct
  source 1..22: mol_type = other RNA
ccaaaaggcatgcgctcccgca

SEQ ID NO: 13533 - RNA, 22 nt, synthetic construct
  source 1..22: mol_type = other RNA
ccaaagaggaagccctctgtac

SEQ ID NO: 13534 - RNA, 22 nt, synthetic construct
  source 1..22: mol_type = other RNA
ccaaaggcgcggcgctgaggtt

SEQ ID NO: 13535 - RNA, 22 nt, synthetic construct
  source 1..22: mol_type = other RNA
ccaaaggtctcccctgctcccc

SEQ ID NO: 13536 - RNA, 22 nt, synthetic construct
  source 1..22: mol_type = other RNA
ccaacatggtgaagcctggtct

SEQ ID NO: 13537 - RNA, 22 nt, synthetic construct
  source 1..22: mol_type = other RNA
ccaaccccctcatgttttcaaa

SEQ ID NO: 13538 - RNA, 22 nt, synthetic construct
  source 1..22: mol_type = other RNA
ccaacctcggcgctctgacgct

SEQ ID NO: 13539 - RNA, 22 nt, synthetic construct
  source 1..22: mol_type = other RNA
ccaagatgtactgtgcctctta

SEQ ID NO: 13540 - RNA, 22 nt, synthetic construct
  source 1..22: mol_type = other RNA
ccaagcattctacaaacgtcgc

SEQ ID NO: 13541 - RNA, 22 nt, synthetic construct
  source 1..22: mol_type = other RNA
ccaagcgcccctccacgcgttc

SEQ ID NO: 13542 - RNA, 22 nt, synthetic construct
  source 1..22: mol_type = other RNA
ccaaggactttatgtgctttgc

SEQ ID NO: 13543 - RNA, 22 nt, synthetic construct
  source 1..22: mol_type = other RNA
ccaaggagaacttggagaaggg

SEQ ID NO: 13544 - RNA, 22 nt, synthetic construct
  source 1..22: mol_type = other RNA
ccaagttctccttggtggcccg

SEQ ID NO: 13545 - RNA, 22 nt, synthetic construct
  source 1..22: mol_type = other RNA
ccacacccggctaatttttgtt

SEQ ID NO: 13546 - RNA, 22 nt, synthetic construct
  source 1..22: mol_type = other RNA
ccacaccgtggggaggaaacag

SEQ ID NO: 13547 - RNA, 22 nt, synthetic construct
  source 1..22: mol_type = other RNA
ccacagagggtgcagagcggga

SEQ ID NO: 13548 - RNA, 22 nt, synthetic construct
  source 1..22: mol_type = other RNA
ccacagctctccagtctaaggg

SEQ ID NO: 13549 - RNA, 22 nt, synthetic construct
  source 1..22: mol_type = other RNA
ccacaggcacgagccaccacac

SEQ ID NO: 13550 - RNA, 22 nt, synthetic construct
  source 1..22: mol_type = other RNA
ccacagggcccatgccgcccag

SEQ ID NO: 13551 - RNA, 22 nt, synthetic construct
  source 1..22: mol_type = other RNA
ccacatagacccagaggtgcta

SEQ ID NO: 13552 - RNA, 22 nt, synthetic construct
  source 1..22: mol_type = other RNA
ccaccaaggagaacttggagaa

SEQ ID NO: 13553 - RNA, 22 nt, synthetic construct
  source 1..22: mol_type = other RNA
ccaccacacccggctaattttt

SEQ ID NO: 13554 - RNA, 22 nt, synthetic construct
  source 1..22: mol_type = other RNA
ccaccccgccgcttccccgaga

SEQ ID NO: 13555 - RNA, 22 nt, synthetic construct
  source 1..22: mol_type = other RNA
ccaccggagcagctgggaccac

SEQ ID NO: 13556 - RNA, 22 nt, synthetic construct
  source 1..22: mol_type = other RNA
ccacgcccaaccccctcatgtt

SEQ ID NO: 13557 - RNA, 22 nt, synthetic construct
  source 1..22: mol_type = other RNA
ccacgcgttcacaaacctcagc

SEQ ID NO: 13558 - RNA, 22 nt, synthetic construct
  source 1..22: mol_type = other RNA
ccacgctggagtgcactggcgc

SEQ ID NO: 13559 - RNA, 22 nt, synthetic construct
  source 1..22: mol_type = other RNA
ccacggcgggccaccaaggaga

SEQ ID NO: 13560 - RNA, 22 nt, synthetic construct
  source 1..22: mol_type = other RNA
ccacggtgtggccccacataga

SEQ ID NO: 13561 - RNA, 22 nt, synthetic construct
  source 1..22: mol_type = other RNA
ccactccagctgcgctggggga

SEQ ID NO: 13562 - RNA, 22 nt, synthetic construct
  source 1..22: mol_type = other RNA
ccagaccccaagcgcccctcca

SEQ ID NO: 13563 - RNA, 22 nt, synthetic construct
  source 1..22: mol_type = other RNA
ccagagcaaactgggcggcatg

SEQ ID NO: 13564 - RNA, 22 nt, synthetic construct
  source 1..22: mol_type = other RNA
ccagaggccccgcgaaagagcg

SEQ ID NO: 13565 - RNA, 22 nt, synthetic construct
  source 1..22: mol_type = other RNA
ccagaggtgctaggacatgcga

SEQ ID NO: 13566 - RNA, 22 nt, synthetic construct
  source 1..22: mol_type = other RNA
ccagccctggactagccccacg

SEQ ID NO: 13567 - RNA, 22 nt, synthetic construct
  source 1..22: mol_type = other RNA
ccagcgcagctggagtggggga

SEQ ID NO: 13568 - RNA, 22 nt, synthetic construct
  source 1..22: mol_type = other RNA
ccagctgcgctgggggagccag

SEQ ID NO: 13569 - RNA, 22 nt, synthetic construct
  source 1..22: mol_type = other RNA
ccagctgctccggtggctgagg

SEQ ID NO: 13570 - RNA, 22 nt, synthetic construct
  source 1..22: mol_type = other RNA
ccaggcaaagagccaaagagga

SEQ ID NO: 13571 - RNA, 22 nt, synthetic construct
  source 1..22: mol_type = other RNA
ccaggctggtctcaactacgga

SEQ ID NO: 13572 - RNA, 22 nt, synthetic construct
  source 1..22: mol_type = other RNA
ccagggctggatctcggggaag

SEQ ID NO: 13573 - RNA, 22 nt, synthetic construct
  source 1..22: mol_type = other RNA
ccagggcttttgcgggagcgca

SEQ ID NO: 13574 - RNA, 22 nt, synthetic construct
  source 1..22: mol_type = other RNA
ccagtctaagggaagcagagcc

SEQ ID NO: 13575 - RNA, 22 nt, synthetic construct
  source 1..22: mol_type = other RNA
ccagtgcactccagcgtgggca

SEQ ID NO: 13576 - RNA, 22 nt, synthetic construct
  source 1..22: mol_type = other RNA
ccagtttgctctggagaatctc

SEQ ID NO: 13577 - RNA, 22 nt, synthetic construct
  source 1..22: mol_type = other RNA
ccatagataactactatggtta

SEQ ID NO: 13578 - RNA, 22 nt, synthetic construct
  source 1..22: mol_type = other RNA
ccatagtagttatctatggcgg

SEQ ID NO: 13579 - RNA, 22 nt, synthetic construct
  source 1..22: mol_type = other RNA
ccatcacatgtcacttttaaaa

SEQ ID NO: 13580 - RNA, 22 nt, synthetic construct
  source 1..22: mol_type = other RNA
ccatcctcccgcctcggcctcc

SEQ ID NO: 13581 - RNA, 22 nt, synthetic construct
  source 1..22: mol_type = other RNA
ccatgatagctcaaaagcctaa

SEQ ID NO: 13582 - RNA, 22 nt, synthetic construct
  source 1..22: mol_type = other RNA
ccatgccgcccagtttgctctg

SEQ ID NO: 13583 - RNA, 22 nt, synthetic construct
  source 1..22: mol_type = other RNA
ccatgttggccaggctggtctc

SEQ ID NO: 13584 - RNA, 22 nt, synthetic construct
  source 1..22: mol_type = other RNA
ccatttatcccctgtgtaatta

SEQ ID NO: 13585 - RNA, 22 nt, synthetic construct
  source 1..22: mol_type = other RNA
cccaaaggcgcggcgctgaggt

SEQ ID NO: 13586 - RNA, 22 nt, synthetic construct
  source 1..22: mol_type = other RNA
cccaaccccctcatgttttcaa

SEQ ID NO: 13587 - RNA, 22 nt, synthetic construct
  source 1..22: mol_type = other RNA
cccaacctcggcgctctgacgc

SEQ ID NO: 13588 - RNA, 22 nt, synthetic construct
  source 1..22: mol_type = other RNA
cccaagcgcccctccacgcgtt

SEQ ID NO: 13589 - RNA, 22 nt, synthetic construct
  source 1..22: mol_type = other RNA
cccacatagacccagaggtgct

SEQ ID NO: 13590 - RNA, 22 nt, synthetic construct
  source 1..22: mol_type = other RNA
cccacgctggagtgcactggcg

SEQ ID NO: 13591 - RNA, 22 nt, synthetic construct
  source 1..22: mol_type = other RNA
cccacggcgggccaccaaggag

SEQ ID NO: 13592 - RNA, 22 nt, synthetic construct
  source 1..22: mol_type = other RNA
cccacggtgtggccccacatag

SEQ ID NO: 13593 - RNA, 22 nt, synthetic construct
  source 1..22: mol_type = other RNA
cccactccagctgcgctggggg

SEQ ID NO: 13594 - RNA, 22 nt, synthetic construct
  source 1..22: mol_type = other RNA
cccagaccccaagcgcccctcc

SEQ ID NO: 13595 - RNA, 22 nt, synthetic construct
  source 1..22: mol_type = other RNA
cccagaggtgctaggacatgcg

SEQ ID NO: 13596 - RNA, 22 nt, synthetic construct
  source 1..22: mol_type = other RNA
cccagcgcagctggagtggggg

SEQ ID NO: 13597 - RNA, 22 nt, synthetic construct
  source 1..22: mol_type = other RNA
cccagctgctccggtggctgag

SEQ ID NO: 13598 - RNA, 22 nt, synthetic construct
  source 1..22: mol_type = other RNA
cccagtttgctctggagaatct

SEQ ID NO: 13599 - RNA, 22 nt, synthetic construct
  source 1..22: mol_type = other RNA
cccatcacatgtcacttttaaa

SEQ ID NO: 13600 - RNA, 22 nt, synthetic construct
  source 1..22: mol_type = other RNA
cccatgccgcccagtttgctct

SEQ ID NO: 13601 - RNA, 22 nt, synthetic construct
  source 1..22: mol_type = other RNA
ccccaacctcggcgctctgacg

SEQ ID NO: 13602 - RNA, 22 nt, synthetic construct
  source 1..22: mol_type = other RNA
ccccaagcgcccctccacgcgt

SEQ ID NO: 13603 - RNA, 22 nt, synthetic construct
  source 1..22: mol_type = other RNA
ccccacatagacccagaggtgc

SEQ ID NO: 13604 - RNA, 22 nt, synthetic construct
  source 1..22: mol_type = other RNA
ccccacggcgggccaccaagga

SEQ ID NO: 13605 - RNA, 22 nt, synthetic construct
  source 1..22: mol_type = other RNA
ccccacggtgtggccccacata

SEQ ID NO: 13606 - RNA, 22 nt, synthetic construct
  source 1..22: mol_type = other RNA
ccccactccagctgcgctgggg

SEQ ID NO: 13607 - RNA, 22 nt, synthetic construct
  source 1..22: mol_type = other RNA
ccccagaccccaagcgcccctc

SEQ ID NO: 13608 - RNA, 22 nt, synthetic construct
  source 1..22: mol_type = other RNA
ccccagcgcagctggagtgggg

SEQ ID NO: 13609 - RNA, 22 nt, synthetic construct
  source 1..22: mol_type = other RNA
cccccaacctcggcgctctgac

SEQ ID NO: 13610 - RNA, 22 nt, synthetic construct
  source 1..22: mol_type = other RNA
cccccactccagctgcgctggg

SEQ ID NO: 13611 - RNA, 22 nt, synthetic construct
  source 1..22: mol_type = other RNA
cccccagaccccaagcgcccct

SEQ ID NO: 13612 - RNA, 22 nt, synthetic construct
  source 1..22: mol_type = other RNA
cccccagcgcagctggagtggg

SEQ ID NO: 13613 - RNA, 22 nt, synthetic construct
  source 1..22: mol_type = other RNA
ccccctcatgttttcaaaaccg

SEQ ID NO: 13614 - RNA, 22 nt, synthetic construct
  source 1..22: mol_type = other RNA
cccccttccccactcccaggcc

SEQ ID NO: 13615 - RNA, 22 nt, synthetic construct
  source 1..22: mol_type = other RNA
ccccgagatccagccctggact

SEQ ID NO: 13616 - RNA, 22 nt, synthetic construct
  source 1..22: mol_type = other RNA
ccccgccgaaaggggcaagtag

SEQ ID NO: 13617 - RNA, 22 nt, synthetic construct
  source 1..22: mol_type = other RNA
ccccgccgcttccccgagatcc

SEQ ID NO: 13618 - RNA, 22 nt, synthetic construct
  source 1..22: mol_type = other RNA
ccccgcgaaagagcggaagaga

SEQ ID NO: 13619 - RNA, 22 nt, synthetic construct
  source 1..22: mol_type = other RNA
cccctcatgttttcaaaaccga

SEQ ID NO: 13620 - RNA, 22 nt, synthetic construct
  source 1..22: mol_type = other RNA
cccctccacgcgttcacaaacc

SEQ ID NO: 13621 - RNA, 22 nt, synthetic construct
  source 1..22: mol_type = other RNA
cccctgctccccgccgaaaggg

SEQ ID NO: 13622 - RNA, 22 nt, synthetic construct
  source 1..22: mol_type = other RNA
cccctgtgtaattaagtttctt

SEQ ID NO: 13623 - RNA, 22 nt, synthetic construct
  source 1..22: mol_type = other RNA
ccccttccccactcccaggcca

SEQ ID NO: 13624 - RNA, 22 nt, synthetic construct
  source 1..22: mol_type = other RNA
cccctttcggcggggagcaggg

SEQ ID NO: 13625 - RNA, 22 nt, synthetic construct
  source 1..22: mol_type = other RNA
cccgaccctcccgtcgccgtag

SEQ ID NO: 13626 - RNA, 22 nt, synthetic construct
  source 1..22: mol_type = other RNA
cccgagatccagccctggacta

SEQ ID NO: 13627 - RNA, 22 nt, synthetic construct
  source 1..22: mol_type = other RNA
cccgcaaaagccctggttaggc

SEQ ID NO: 13628 - RNA, 22 nt, synthetic construct
  source 1..22: mol_type = other RNA
cccgccgaaaggggcaagtagc

SEQ ID NO: 13629 - RNA, 22 nt, synthetic construct
  source 1..22: mol_type = other RNA
cccgccgcttccccgagatcca

SEQ ID NO: 13630 - RNA, 22 nt, synthetic construct
  source 1..22: mol_type = other RNA
cccgccgtggggctagtccagg

SEQ ID NO: 13631 - RNA, 22 nt, synthetic construct
  source 1..22: mol_type = other RNA
cccgcctcagccaccggagcag

SEQ ID NO: 13632 - RNA, 22 nt, synthetic construct
  source 1..22: mol_type = other RNA
cccgcgaaagagcggaagagaa

SEQ ID NO: 13633 - RNA, 22 nt, synthetic construct
  source 1..22: mol_type = other RNA
cccgctaagttcgcatgtccta

SEQ ID NO: 13634 - RNA, 22 nt, synthetic construct
  source 1..22: mol_type = other RNA
cccgctctgcaccctctgtggc

SEQ ID NO: 13635 - RNA, 22 nt, synthetic construct
  source 1..22: mol_type = other RNA
cccgctctggtccttcctctcc

SEQ ID NO: 13636 - RNA, 22 nt, synthetic construct
  source 1..22: mol_type = other RNA
cccggctaatttttgttattat

SEQ ID NO: 13637 - RNA, 22 nt, synthetic construct
  source 1..22: mol_type = other RNA
cccgggacgcgcgctacttgcc

SEQ ID NO: 13638 - RNA, 22 nt, synthetic construct
  source 1..22: mol_type = other RNA
cccgggtaagcctgtctgctgc

SEQ ID NO: 13639 - RNA, 22 nt, synthetic construct
  source 1..22: mol_type = other RNA
cccgtcccccactccagctgcg

SEQ ID NO: 13640 - RNA, 22 nt, synthetic construct
  source 1..22: mol_type = other RNA
cccgtcgccgtaggccaaaggt

SEQ ID NO: 13641 - RNA, 22 nt, synthetic construct
  source 1..22: mol_type = other RNA
cccgttattgacatctttctgt

SEQ ID NO: 13642 - RNA, 22 nt, synthetic construct
  source 1..22: mol_type = other RNA
ccctaaactttgtcccgaccct

SEQ ID NO: 13643 - RNA, 22 nt, synthetic construct
  source 1..22: mol_type = other RNA
ccctcatgttttcaaaaccgaa

SEQ ID NO: 13644 - RNA, 22 nt, synthetic construct
  source 1..22: mol_type = other RNA
ccctccacgcgttcacaaacct

SEQ ID NO: 13645 - RNA, 22 nt, synthetic construct
  source 1..22: mol_type = other RNA
ccctcccccaacctcggcgctc

SEQ ID NO: 13646 - RNA, 22 nt, synthetic construct
  source 1..22: mol_type = other RNA
ccctcccgctctggtccttcct

SEQ ID NO: 13647 - RNA, 22 nt, synthetic construct
  source 1..22: mol_type = other RNA
ccctcccgtcgccgtaggccaa

SEQ ID NO: 13648 - RNA, 22 nt, synthetic construct
  source 1..22: mol_type = other RNA
ccctcgctgtgctctctcgctc

SEQ ID NO: 13649 - RNA, 22 nt, synthetic construct
  source 1..22: mol_type = other RNA
ccctctgtacgaaaagaccaca

SEQ ID NO: 13650 - RNA, 22 nt, synthetic construct
  source 1..22: mol_type = other RNA
ccctctgtggccctcgctgtgc

SEQ ID NO: 13651 - RNA, 22 nt, synthetic construct
  source 1..22: mol_type = other RNA
ccctgctccccgccgaaagggg

SEQ ID NO: 13652 - RNA, 22 nt, synthetic construct
  source 1..22: mol_type = other RNA
ccctggactagccccacggcgg

SEQ ID NO: 13653 - RNA, 22 nt, synthetic construct
  source 1..22: mol_type = other RNA
ccctggttaggcttgacttcaa

SEQ ID NO: 13654 - RNA, 22 nt, synthetic construct
  source 1..22: mol_type = other RNA
ccctgtggtcttttcgtacaga

SEQ ID NO: 13655 - RNA, 22 nt, synthetic construct
  source 1..22: mol_type = other RNA
ccctgtgtaattaagtttctta

SEQ ID NO: 13656 - RNA, 22 nt, synthetic construct
  source 1..22: mol_type = other RNA
cccttagactggagagctgtgg

SEQ ID NO: 13657 - RNA, 22 nt, synthetic construct
  source 1..22: mol_type = other RNA
cccttccccactcccaggccac

SEQ ID NO: 13658 - RNA, 22 nt, synthetic construct
  source 1..22: mol_type = other RNA
cccttctccaagttctccttgg

SEQ ID NO: 13659 - RNA, 22 nt, synthetic construct
  source 1..22: mol_type = other RNA
ccctttcggcggggagcagggg

SEQ ID NO: 13660 - RNA, 22 nt, synthetic construct
  source 1..22: mol_type = other RNA
ccgaaaggggcaagtagcgcgc

SEQ ID NO: 13661 - RNA, 22 nt, synthetic construct
  source 1..22: mol_type = other RNA
ccgaaagtaagaggcacagtac

SEQ ID NO: 13662 - RNA, 22 nt, synthetic construct
  source 1..22: mol_type = other RNA
ccgaccctcccgtcgccgtagg

SEQ ID NO: 13663 - RNA, 22 nt, synthetic construct
  source 1..22: mol_type = other RNA
ccgagatccagccctggactag

SEQ ID NO: 13664 - RNA, 22 nt, synthetic construct
  source 1..22: mol_type = other RNA
ccgagattttaagaaacttaat

SEQ ID NO: 13665 - RNA, 22 nt, synthetic construct
  source 1..22: mol_type = other RNA
ccgaggcgggaggatggcttga

SEQ ID NO: 13666 - RNA, 22 nt, synthetic construct
  source 1..22: mol_type = other RNA
ccgaggttgggggagggtttct

SEQ ID NO: 13667 - RNA, 22 nt, synthetic construct
  source 1..22: mol_type = other RNA
ccgcaaaagccctggttaggct

SEQ ID NO: 13668 - RNA, 22 nt, synthetic construct
  source 1..22: mol_type = other RNA
ccgcagcagacaggcttacccg

SEQ ID NO: 13669 - RNA, 22 nt, synthetic construct
  source 1..22: mol_type = other RNA
ccgccatagataactactatgg

SEQ ID NO: 13670 - RNA, 22 nt, synthetic construct
  source 1..22: mol_type = other RNA
ccgcccagtttgctctggagaa

SEQ ID NO: 13671 - RNA, 22 nt, synthetic construct
  source 1..22: mol_type = other RNA
ccgccgaaaggggcaagtagcg

SEQ ID NO: 13672 - RNA, 22 nt, synthetic construct
  source 1..22: mol_type = other RNA
ccgccgcttccccgagatccag

SEQ ID NO: 13673 - RNA, 22 nt, synthetic construct
  source 1..22: mol_type = other RNA
ccgccgtggggctagtccaggg

SEQ ID NO: 13674 - RNA, 22 nt, synthetic construct
  source 1..22: mol_type = other RNA
ccgcctcagccaccggagcagc

SEQ ID NO: 13675 - RNA, 22 nt, synthetic construct
  source 1..22: mol_type = other RNA
ccgcgaaagagcggaagagaaa

SEQ ID NO: 13676 - RNA, 22 nt, synthetic construct
  source 1..22: mol_type = other RNA
ccgcgcctttgggacgagccta

SEQ ID NO: 13677 - RNA, 22 nt, synthetic construct
  source 1..22: mol_type = other RNA
ccgctaagttcgcatgtcctag

SEQ ID NO: 13678 - RNA, 22 nt, synthetic construct
  source 1..22: mol_type = other RNA
ccgctctgcaccctctgtggcc

SEQ ID NO: 13679 - RNA, 22 nt, synthetic construct
  source 1..22: mol_type = other RNA
ccgctctggtccttcctctccc

SEQ ID NO: 13680 - RNA, 22 nt, synthetic construct
  source 1..22: mol_type = other RNA
ccgctctttcgcggggcctctg

SEQ ID NO: 13681 - RNA, 22 nt, synthetic construct
  source 1..22: mol_type = other RNA
ccgcttccccgagatccagccc

SEQ ID NO: 13682 - RNA, 22 nt, synthetic construct
  source 1..22: mol_type = other RNA
ccgctttgtatcacagccaagc

SEQ ID NO: 13683 - RNA, 22 nt, synthetic construct
  source 1..22: mol_type = other RNA
ccggagcagctgggaccacagg

SEQ ID NO: 13684 - RNA, 22 nt, synthetic construct
  source 1..22: mol_type = other RNA
ccggctaatttttgttattatt

SEQ ID NO: 13685 - RNA, 22 nt, synthetic construct
  source 1..22: mol_type = other RNA
ccgggacgcgcgctacttgccc

SEQ ID NO: 13686 - RNA, 22 nt, synthetic construct
  source 1..22: mol_type = other RNA
ccgggtaagcctgtctgctgcg

SEQ ID NO: 13687 - RNA, 22 nt, synthetic construct
  source 1..22: mol_type = other RNA
ccgggtgtggtggctcgtgcct

SEQ ID NO: 13688 - RNA, 22 nt, synthetic construct
  source 1..22: mol_type = other RNA
ccggtggctgaggcgggaggat

SEQ ID NO: 13689 - RNA, 22 nt, synthetic construct
  source 1..22: mol_type = other RNA
ccgtaggccaaaggtctcccct

SEQ ID NO: 13690 - RNA, 22 nt, synthetic construct
  source 1..22: mol_type = other RNA
ccgtagttgagaccagcctggc

SEQ ID NO: 13691 - RNA, 22 nt, synthetic construct
  source 1..22: mol_type = other RNA
ccgtcccccactccagctgcgc

SEQ ID NO: 13692 - RNA, 22 nt, synthetic construct
  source 1..22: mol_type = other RNA
ccgtcgccgtaggccaaaggtc

SEQ ID NO: 13693 - RNA, 22 nt, synthetic construct
  source 1..22: mol_type = other RNA
ccgtgacttcccttctccaagt

SEQ ID NO: 13694 - RNA, 22 nt, synthetic construct
  source 1..22: mol_type = other RNA
ccgtggggaggaaacagcacgc

SEQ ID NO: 13695 - RNA, 22 nt, synthetic construct
  source 1..22: mol_type = other RNA
ccgtggggctagtccagggctg

SEQ ID NO: 13696 - RNA, 22 nt, synthetic construct
  source 1..22: mol_type = other RNA
ccgttattgacatctttctgtg

SEQ ID NO: 13697 - RNA, 22 nt, synthetic construct
  source 1..22: mol_type = other RNA
cctaaactttgtcccgaccctc

SEQ ID NO: 13698 - RNA, 22 nt, synthetic construct
  source 1..22: mol_type = other RNA
cctaaccagggcttttgcggga

SEQ ID NO: 13699 - RNA, 22 nt, synthetic construct
  source 1..22: mol_type = other RNA
cctaagctcaagagatcctccc

SEQ ID NO: 13700 - RNA, 22 nt, synthetic construct
  source 1..22: mol_type = other RNA
cctacccgtcccccactccagc

SEQ ID NO: 13701 - RNA, 22 nt, synthetic construct
  source 1..22: mol_type = other RNA
cctaccctcccgctctggtcct

SEQ ID NO: 13702 - RNA, 22 nt, synthetic construct
  source 1..22: mol_type = other RNA
cctacggcgacgggagggtcgg

SEQ ID NO: 13703 - RNA, 22 nt, synthetic construct
  source 1..22: mol_type = other RNA
cctagacgaagtccacagctct

SEQ ID NO: 13704 - RNA, 22 nt, synthetic construct
  source 1..22: mol_type = other RNA
cctagcacctctgggtctatgt

SEQ ID NO: 13705 - RNA, 22 nt, synthetic construct
  source 1..22: mol_type = other RNA
cctcagccaccggagcagctgg

SEQ ID NO: 13706 - RNA, 22 nt, synthetic construct
  source 1..22: mol_type = other RNA
cctcagcgccgcgcctttggga

SEQ ID NO: 13707 - RNA, 22 nt, synthetic construct
  source 1..22: mol_type = other RNA
cctcatgttttcaaaaccgaaa

SEQ ID NO: 13708 - RNA, 22 nt, synthetic construct
  source 1..22: mol_type = other RNA
cctccacgcgttcacaaacctc

SEQ ID NO: 13709 - RNA, 22 nt, synthetic construct
  source 1..22: mol_type = other RNA
cctccccacggtgtggccccac

SEQ ID NO: 13710 - RNA, 22 nt, synthetic construct
  source 1..22: mol_type = other RNA
cctcccccaacctcggcgctct

SEQ ID NO: 13711 - RNA, 22 nt, synthetic construct
  source 1..22: mol_type = other RNA
cctcccccagaccccaagcgcc

SEQ ID NO: 13712 - RNA, 22 nt, synthetic construct
  source 1..22: mol_type = other RNA
cctcccgcctcagccaccggag

SEQ ID NO: 13713 - RNA, 22 nt, synthetic construct
  source 1..22: mol_type = other RNA
cctcccgctctggtccttcctc

SEQ ID NO: 13714 - RNA, 22 nt, synthetic construct
  source 1..22: mol_type = other RNA
cctcccgtcgccgtaggccaaa

SEQ ID NO: 13715 - RNA, 22 nt, synthetic construct
  source 1..22: mol_type = other RNA
cctcgctgtgctctctcgctcc

SEQ ID NO: 13716 - RNA, 22 nt, synthetic construct
  source 1..22: mol_type = other RNA
cctcggcgctctgacgcttatc

SEQ ID NO: 13717 - RNA, 22 nt, synthetic construct
  source 1..22: mol_type = other RNA
cctctcacagatgaagaaacta

SEQ ID NO: 13718 - RNA, 22 nt, synthetic construct
  source 1..22: mol_type = other RNA
cctctcccgctctgcaccctct

SEQ ID NO: 13719 - RNA, 22 nt, synthetic construct
  source 1..22: mol_type = other RNA
cctctggctcccccagcgcagc

SEQ ID NO: 13720 - RNA, 22 nt, synthetic construct
  source 1..22: mol_type = other RNA
cctctgggtctatgtggggcca

SEQ ID NO: 13721 - RNA, 22 nt, synthetic construct
  source 1..22: mol_type = other RNA
cctctgtacgaaaagaccacag

SEQ ID NO: 13722 - RNA, 22 nt, synthetic construct
  source 1..22: mol_type = other RNA
cctctgtggccctcgctgtgct

SEQ ID NO: 13723 - RNA, 22 nt, synthetic construct
  source 1..22: mol_type = other RNA
cctcttactttcggttttgaaa

SEQ ID NO: 13724 - RNA, 22 nt, synthetic construct
  source 1..22: mol_type = other RNA
cctctttggctctttgcctggt

SEQ ID NO: 13725 - RNA, 22 nt, synthetic construct
  source 1..22: mol_type = other RNA
cctgccttctgcgtgagattct

SEQ ID NO: 13726 - RNA, 22 nt, synthetic construct
  source 1..22: mol_type = other RNA
cctgctccccgccgaaaggggc

SEQ ID NO: 13727 - RNA, 22 nt, synthetic construct
  source 1..22: mol_type = other RNA
cctggactagccccacggcggg

SEQ ID NO: 13728 - RNA, 22 nt, synthetic construct
  source 1..22: mol_type = other RNA
cctgggagtggggaagggggtg

SEQ ID NO: 13729 - RNA, 22 nt, synthetic construct
  source 1..22: mol_type = other RNA
cctggtctctacaaaaaataat

SEQ ID NO: 13730 - RNA, 22 nt, synthetic construct
  source 1..22: mol_type = other RNA
cctggttaggcttgacttcaat

SEQ ID NO: 13731 - RNA, 22 nt, synthetic construct
  source 1..22: mol_type = other RNA
cctggttgtttccaagatgtac

SEQ ID NO: 13732 - RNA, 22 nt, synthetic construct
  source 1..22: mol_type = other RNA
cctgtctgctgcggctctgctt

SEQ ID NO: 13733 - RNA, 22 nt, synthetic construct
  source 1..22: mol_type = other RNA
cctgtggtcccagctgctccgg

SEQ ID NO: 13734 - RNA, 22 nt, synthetic construct
  source 1..22: mol_type = other RNA
cctgtggtcttttcgtacagag

SEQ ID NO: 13735 - RNA, 22 nt, synthetic construct
  source 1..22: mol_type = other RNA
cctgtgtaattaagtttcttaa

SEQ ID NO: 13736 - RNA, 22 nt, synthetic construct
  source 1..22: mol_type = other RNA
ccttagactggagagctgtgga

SEQ ID NO: 13737 - RNA, 22 nt, synthetic construct
  source 1..22: mol_type = other RNA
ccttagtttcttcatctgtgag

SEQ ID NO: 13738 - RNA, 22 nt, synthetic construct
  source 1..22: mol_type = other RNA
ccttccccactcccaggccacc

SEQ ID NO: 13739 - RNA, 22 nt, synthetic construct
  source 1..22: mol_type = other RNA
ccttcctctcccgctctgcacc

SEQ ID NO: 13740 - RNA, 22 nt, synthetic construct
  source 1..22: mol_type = other RNA
ccttctccaagttctccttggt

SEQ ID NO: 13741 - RNA, 22 nt, synthetic construct
  source 1..22: mol_type = other RNA
ccttctgcgtgagattctccag

SEQ ID NO: 13742 - RNA, 22 nt, synthetic construct
  source 1..22: mol_type = other RNA
ccttggcacacagaaagatgtc

SEQ ID NO: 13743 - RNA, 22 nt, synthetic construct
  source 1..22: mol_type = other RNA
cctttcggcggggagcagggga

SEQ ID NO: 13744 - RNA, 22 nt, synthetic construct
  source 1..22: mol_type = other RNA
cctttggcctacggcgacggga

SEQ ID NO: 13745 - RNA, 22 nt, synthetic construct
  source 1..22: mol_type = other RNA
cctttgggacgagcctacccgt

SEQ ID NO: 13746 - RNA, 22 nt, synthetic construct
  source 1..22: mol_type = other RNA
ccttttggctgtaattcgtgca

SEQ ID NO: 13747 - RNA, 22 nt, synthetic construct
  source 1..22: mol_type = other RNA
cgaaaagaccacagggcccatg

SEQ ID NO: 13748 - RNA, 22 nt, synthetic construct
  source 1..22: mol_type = other RNA
cgaaaccgctttgtatcacagc

SEQ ID NO: 13749 - RNA, 22 nt, synthetic construct
  source 1..22: mol_type = other RNA
cgaaagagcggaagagaaaccc

SEQ ID NO: 13750 - RNA, 22 nt, synthetic construct
  source 1..22: mol_type = other RNA
cgaaaggggcaagtagcgcgcg

SEQ ID NO: 13751 - RNA, 22 nt, synthetic construct
  source 1..22: mol_type = other RNA
cgaaagtaagaggcacagtaca

SEQ ID NO: 13752 - RNA, 22 nt, synthetic construct
  source 1..22: mol_type = other RNA
cgaacttagcgggcgcctagac

SEQ ID NO: 13753 - RNA, 22 nt, synthetic construct
  source 1..22: mol_type = other RNA
cgaagtccacagctctccagtc

SEQ ID NO: 13754 - RNA, 22 nt, synthetic construct
  source 1..22: mol_type = other RNA
cgaattacagccaaaaggcatg

SEQ ID NO: 13755 - RNA, 22 nt, synthetic construct
  source 1..22: mol_type = other RNA
cgaccctcccgtcgccgtaggc

SEQ ID NO: 13756 - RNA, 22 nt, synthetic construct
  source 1..22: mol_type = other RNA
cgacgccctaaactttgtcccg

SEQ ID NO: 13757 - RNA, 22 nt, synthetic construct
  source 1..22: mol_type = other RNA
cgacgcctcccccagaccccaa

SEQ ID NO: 13758 - RNA, 22 nt, synthetic construct
  source 1..22: mol_type = other RNA
cgacgggagggtcgggacaaag

SEQ ID NO: 13759 - RNA, 22 nt, synthetic construct
  source 1..22: mol_type = other RNA
cgacgtttgtagaatgcttggc

SEQ ID NO: 13760 - RNA, 22 nt, synthetic construct
  source 1..22: mol_type = other RNA
cgagagagcacagcgagggcca

SEQ ID NO: 13761 - RNA, 22 nt, synthetic construct
  source 1..22: mol_type = other RNA
cgagatccagccctggactagc

SEQ ID NO: 13762 - RNA, 22 nt, synthetic construct
  source 1..22: mol_type = other RNA
cgagattgaagtcaagcctaac

SEQ ID NO: 13763 - RNA, 22 nt, synthetic construct
  source 1..22: mol_type = other RNA
cgagccaccacacccggctaat

SEQ ID NO: 13764 - RNA, 22 nt, synthetic construct
  source 1..22: mol_type = other RNA
cgagcctacccgtcccccactc

SEQ ID NO: 13765 - RNA, 22 nt, synthetic construct
  source 1..22: mol_type = other RNA
cgaggcgggaggatggcttgag

SEQ ID NO: 13766 - RNA, 22 nt, synthetic construct
  source 1..22: mol_type = other RNA
cgagggccacagagggtgcaga

SEQ ID NO: 13767 - RNA, 22 nt, synthetic construct
  source 1..22: mol_type = other RNA
cgaggttgggggagggtttctc

SEQ ID NO: 13768 - RNA, 22 nt, synthetic construct
  source 1..22: mol_type = other RNA
cgataagcgtcagagcgccgag

SEQ ID NO: 13769 - RNA, 22 nt, synthetic construct
  source 1..22: mol_type = other RNA
cgattgctgccatttatcccct

SEQ ID NO: 13770 - RNA, 22 nt, synthetic construct
  source 1..22: mol_type = other RNA
cgcaaaagccctggttaggctt

SEQ ID NO: 13771 - RNA, 22 nt, synthetic construct
  source 1..22: mol_type = other RNA
cgcaaagcacataaagtccttg

SEQ ID NO: 13772 - RNA, 22 nt, synthetic construct
  source 1..22: mol_type = other RNA
cgcacccccttccccactccca

SEQ ID NO: 13773 - RNA, 22 nt, synthetic construct
  source 1..22: mol_type = other RNA
cgcacccgggacgcgcgctact

SEQ ID NO: 13774 - RNA, 22 nt, synthetic construct
  source 1..22: mol_type = other RNA
cgcagaaggcaggcgtttttct

SEQ ID NO: 13775 - RNA, 22 nt, synthetic construct
  source 1..22: mol_type = other RNA
cgcagcagacaggcttacccgg

SEQ ID NO: 13776 - RNA, 22 nt, synthetic construct
  source 1..22: mol_type = other RNA
cgcagctggagtgggggacggg

SEQ ID NO: 13777 - RNA, 22 nt, synthetic construct
  source 1..22: mol_type = other RNA
cgcatgccttttggctgtaatt

SEQ ID NO: 13778 - RNA, 22 nt, synthetic construct
  source 1..22: mol_type = other RNA
cgcatgtcctagcacctctggg

SEQ ID NO: 13779 - RNA, 22 nt, synthetic construct
  source 1..22: mol_type = other RNA
cgccagtgcactccagcgtggg

SEQ ID NO: 13780 - RNA, 22 nt, synthetic construct
  source 1..22: mol_type = other RNA
cgccatagataactactatggt

SEQ ID NO: 13781 - RNA, 22 nt, synthetic construct
  source 1..22: mol_type = other RNA
cgccatgatagctcaaaagcct

SEQ ID NO: 13782 - RNA, 22 nt, synthetic construct
  source 1..22: mol_type = other RNA
cgcccaaccccctcatgttttc

SEQ ID NO: 13783 - RNA, 22 nt, synthetic construct
  source 1..22: mol_type = other RNA
cgcccagtttgctctggagaat

SEQ ID NO: 13784 - RNA, 22 nt, synthetic construct
  source 1..22: mol_type = other RNA
cgcccctccacgcgttcacaaa

SEQ ID NO: 13785 - RNA, 22 nt, synthetic construct
  source 1..22: mol_type = other RNA
cgcccgctaagttcgcatgtcc

SEQ ID NO: 13786 - RNA, 22 nt, synthetic construct
  source 1..22: mol_type = other RNA
cgcccgggtaagcctgtctgct

SEQ ID NO: 13787 - RNA, 22 nt, synthetic construct
  source 1..22: mol_type = other RNA
cgccctaaactttgtcccgacc

SEQ ID NO: 13788 - RNA, 22 nt, synthetic construct
  source 1..22: mol_type = other RNA
cgccgaaaggggcaagtagcgc

SEQ ID NO: 13789 - RNA, 22 nt, synthetic construct
  source 1..22: mol_type = other RNA
cgccgaggttgggggagggttt

SEQ ID NO: 13790 - RNA, 22 nt, synthetic construct
  source 1..22: mol_type = other RNA
cgccgcgcctttgggacgagcc

SEQ ID NO: 13791 - RNA, 22 nt, synthetic construct
  source 1..22: mol_type = other RNA
cgccgcttccccgagatccagc

SEQ ID NO: 13792 - RNA, 22 nt, synthetic construct
  source 1..22: mol_type = other RNA
cgccgtaggccaaaggtctccc

SEQ ID NO: 13793 - RNA, 22 nt, synthetic construct
  source 1..22: mol_type = other RNA
cgccgtggggctagtccagggc

SEQ ID NO: 13794 - RNA, 22 nt, synthetic construct
  source 1..22: mol_type = other RNA
cgcctagacgaagtccacagct

SEQ ID NO: 13795 - RNA, 22 nt, synthetic construct
  source 1..22: mol_type = other RNA
cgcctcagccaccggagcagct

SEQ ID NO: 13796 - RNA, 22 nt, synthetic construct
  source 1..22: mol_type = other RNA
cgcctcccccagaccccaagcg

SEQ ID NO: 13797 - RNA, 22 nt, synthetic construct
  source 1..22: mol_type = other RNA
cgcctgccttctgcgtgagatt

SEQ ID NO: 13798 - RNA, 22 nt, synthetic construct
  source 1..22: mol_type = other RNA
cgcctttgggacgagcctaccc

SEQ ID NO: 13799 - RNA, 22 nt, synthetic construct
  source 1..22: mol_type = other RNA
cgcgaaagagcggaagagaaac

SEQ ID NO: 13800 - RNA, 22 nt, synthetic construct
  source 1..22: mol_type = other RNA
cgcgacgtttgtagaatgcttg

SEQ ID NO: 13801 - RNA, 22 nt, synthetic construct
  source 1..22: mol_type = other RNA
cgcgcctttgggacgagcctac

SEQ ID NO: 13802 - RNA, 22 nt, synthetic construct
  source 1..22: mol_type = other RNA
cgcgcgctacttgcccctttcg

SEQ ID NO: 13803 - RNA, 22 nt, synthetic construct
  source 1..22: mol_type = other RNA
cgcgctacttgcccctttcggc

SEQ ID NO: 13804 - RNA, 22 nt, synthetic construct
  source 1..22: mol_type = other RNA
cgcggcgctgaggtttgtgaac

SEQ ID NO: 13805 - RNA, 22 nt, synthetic construct
  source 1..22: mol_type = other RNA
cgcgtgctgtttcctccccacg

SEQ ID NO: 13806 - RNA, 22 nt, synthetic construct
  source 1..22: mol_type = other RNA
cgcgtggaggggcgcttggggt

SEQ ID NO: 13807 - RNA, 22 nt, synthetic construct
  source 1..22: mol_type = other RNA
cgcgttcacaaacctcagcgcc

SEQ ID NO: 13808 - RNA, 22 nt, synthetic construct
  source 1..22: mol_type = other RNA
cgctaagttcgcatgtcctagc

SEQ ID NO: 13809 - RNA, 22 nt, synthetic construct
  source 1..22: mol_type = other RNA
cgctacttgcccctttcggcgg

SEQ ID NO: 13810 - RNA, 22 nt, synthetic construct
  source 1..22: mol_type = other RNA
cgctcccgcaaaagccctggtt

SEQ ID NO: 13811 - RNA, 22 nt, synthetic construct
  source 1..22: mol_type = other RNA
cgctccgtgacttcccttctcc

SEQ ID NO: 13812 - RNA, 22 nt, synthetic construct
  source 1..22: mol_type = other RNA
cgctctgacgcttatcgacgcc

SEQ ID NO: 13813 - RNA, 22 nt, synthetic construct
  source 1..22: mol_type = other RNA
cgctctgcaccctctgtggccc

SEQ ID NO: 13814 - RNA, 22 nt, synthetic construct
  source 1..22: mol_type = other RNA
cgctctggtccttcctctcccg

SEQ ID NO: 13815 - RNA, 22 nt, synthetic construct
  source 1..22: mol_type = other RNA
cgctctgttgcccacgctggag

SEQ ID NO: 13816 - RNA, 22 nt, synthetic construct
  source 1..22: mol_type = other RNA
cgctctttcgcggggcctctgg

SEQ ID NO: 13817 - RNA, 22 nt, synthetic construct
  source 1..22: mol_type = other RNA
cgctgaggtttgtgaacgcgtg

SEQ ID NO: 13818 - RNA, 22 nt, synthetic construct
  source 1..22: mol_type = other RNA
cgctggagtgcactggcgccat

SEQ ID NO: 13819 - RNA, 22 nt, synthetic construct
  source 1..22: mol_type = other RNA
cgctgtgctctctcgctccgtg

SEQ ID NO: 13820 - RNA, 22 nt, synthetic construct
  source 1..22: mol_type = other RNA
cgcttatcgacgccctaaactt

SEQ ID NO: 13821 - RNA, 22 nt, synthetic construct
  source 1..22: mol_type = other RNA
cgcttccccgagatccagccct

SEQ ID NO: 13822 - RNA, 22 nt, synthetic construct
  source 1..22: mol_type = other RNA
cgcttggggtctgggggaggcg

SEQ ID NO: 13823 - RNA, 22 nt, synthetic construct
  source 1..22: mol_type = other RNA
cgctttgtatcacagccaagca

SEQ ID NO: 13824 - RNA, 22 nt, synthetic construct
  source 1..22: mol_type = other RNA
cggaagagaaaccctcccccaa

SEQ ID NO: 13825 - RNA, 22 nt, synthetic construct
  source 1..22: mol_type = other RNA
cggaagataactgttttcaaaa

SEQ ID NO: 13826 - RNA, 22 nt, synthetic construct
  source 1..22: mol_type = other RNA
cggacctcaagccatcctcccg

SEQ ID NO: 13827 - RNA, 22 nt, synthetic construct
  source 1..22: mol_type = other RNA
cggagcagctgggaccacaggc

SEQ ID NO: 13828 - RNA, 22 nt, synthetic construct
  source 1..22: mol_type = other RNA
cggagcgagagagcacagcgag

SEQ ID NO: 13829 - RNA, 22 nt, synthetic construct
  source 1..22: mol_type = other RNA
cggcatgggccctgtggtcttt

SEQ ID NO: 13830 - RNA, 22 nt, synthetic construct
  source 1..22: mol_type = other RNA
cggcgacgggagggtcgggaca

SEQ ID NO: 13831 - RNA, 22 nt, synthetic construct
  source 1..22: mol_type = other RNA
cggcgctctgacgcttatcgac

SEQ ID NO: 13832 - RNA, 22 nt, synthetic construct
  source 1..22: mol_type = other RNA
cggcgctgaggtttgtgaacgc

SEQ ID NO: 13833 - RNA, 22 nt, synthetic construct
  source 1..22: mol_type = other RNA
cggcgggccaccaaggagaact

SEQ ID NO: 13834 - RNA, 22 nt, synthetic construct
  source 1..22: mol_type = other RNA
cggcggggagcaggggagacct

SEQ ID NO: 13835 - RNA, 22 nt, synthetic construct
  source 1..22: mol_type = other RNA
cggctctgcttcccttagactg

SEQ ID NO: 13836 - RNA, 22 nt, synthetic construct
  source 1..22: mol_type = other RNA
cgggacaaagtttagggcgtcg

SEQ ID NO: 13837 - RNA, 22 nt, synthetic construct
  source 1..22: mol_type = other RNA
cgggacgcgcgctacttgcccc

SEQ ID NO: 13838 - RNA, 22 nt, synthetic construct
  source 1..22: mol_type = other RNA
cgggagaggaaggaccagagcg

SEQ ID NO: 13839 - RNA, 22 nt, synthetic construct
  source 1..22: mol_type = other RNA
cgggagcgcatgccttttggct

SEQ ID NO: 13840 - RNA, 22 nt, synthetic construct
  source 1..22: mol_type = other RNA
cgggaggatctcttgagcttag

SEQ ID NO: 13841 - RNA, 22 nt, synthetic construct
  source 1..22: mol_type = other RNA
cgggaggatggcttgaggtccg

SEQ ID NO: 13842 - RNA, 22 nt, synthetic construct
  source 1..22: mol_type = other RNA
cgggagggtcgggacaaagttt

SEQ ID NO: 13843 - RNA, 22 nt, synthetic construct
  source 1..22: mol_type = other RNA
cgggccaccaaggagaacttgg

SEQ ID NO: 13844 - RNA, 22 nt, synthetic construct
  source 1..22: mol_type = other RNA
cgggcgcctagacgaagtccac

SEQ ID NO: 13845 - RNA, 22 nt, synthetic construct
  source 1..22: mol_type = other RNA
cggggagcaggggagacctttg

SEQ ID NO: 13846 - RNA, 22 nt, synthetic construct
  source 1..22: mol_type = other RNA
cggggtggcctgggagtgggga

SEQ ID NO: 13847 - RNA, 22 nt, synthetic construct
  source 1..22: mol_type = other RNA
cgggtaagcctgtctgctgcgg

SEQ ID NO: 13848 - RNA, 22 nt, synthetic construct
  source 1..22: mol_type = other RNA
cgggtaggctcgtcccaaaggc

SEQ ID NO: 13849 - RNA, 22 nt, synthetic construct
  source 1..22: mol_type = other RNA
cgggtagttcttataatttttt

SEQ ID NO: 13850 - RNA, 22 nt, synthetic construct
  source 1..22: mol_type = other RNA
cgggtgcgcacccccttcccca

SEQ ID NO: 13851 - RNA, 22 nt, synthetic construct
  source 1..22: mol_type = other RNA
cgggtgtggtggctcgtgcctg

SEQ ID NO: 13852 - RNA, 22 nt, synthetic construct
  source 1..22: mol_type = other RNA
cggtgccttagtttcttcatct

SEQ ID NO: 13853 - RNA, 22 nt, synthetic construct
  source 1..22: mol_type = other RNA
cggtggctgaggcgggaggatc

SEQ ID NO: 13854 - RNA, 22 nt, synthetic construct
  source 1..22: mol_type = other RNA
cggtgtggccccacatagaccc

SEQ ID NO: 13855 - RNA, 22 nt, synthetic construct
  source 1..22: mol_type = other RNA
cggtttcgaataattaacttat

SEQ ID NO: 13856 - RNA, 22 nt, synthetic construct
  source 1..22: mol_type = other RNA
cggttttgaaaacatgaggggg

SEQ ID NO: 13857 - RNA, 22 nt, synthetic construct
  source 1..22: mol_type = other RNA
cgtaagctaccacgcccaaccc

SEQ ID NO: 13858 - RNA, 22 nt, synthetic construct
  source 1..22: mol_type = other RNA
cgtacagagggcttcctctttg

SEQ ID NO: 13859 - RNA, 22 nt, synthetic construct
  source 1..22: mol_type = other RNA
cgtaggccaaaggtctcccctg

SEQ ID NO: 13860 - RNA, 22 nt, synthetic construct
  source 1..22: mol_type = other RNA
cgtagttgagaccagcctggcc

SEQ ID NO: 13861 - RNA, 22 nt, synthetic construct
  source 1..22: mol_type = other RNA
cgtcagagcgccgaggttgggg

SEQ ID NO: 13862 - RNA, 22 nt, synthetic construct
  source 1..22: mol_type = other RNA
cgtcatttaattttgaaaacag

SEQ ID NO: 13863 - RNA, 22 nt, synthetic construct
  source 1..22: mol_type = other RNA
cgtcccaaaggcgcggcgctga

SEQ ID NO: 13864 - RNA, 22 nt, synthetic construct
  source 1..22: mol_type = other RNA
cgtcccccactccagctgcgct

SEQ ID NO: 13865 - RNA, 22 nt, synthetic construct
  source 1..22: mol_type = other RNA
cgtcccgggtgcgcaccccctt

SEQ ID NO: 13866 - RNA, 22 nt, synthetic construct
  source 1..22: mol_type = other RNA
cgtcgataagcgtcagagcgcc

SEQ ID NO: 13867 - RNA, 22 nt, synthetic construct
  source 1..22: mol_type = other RNA
cgtcgcccgggtaagcctgtct

SEQ ID NO: 13868 - RNA, 22 nt, synthetic construct
  source 1..22: mol_type = other RNA
cgtcgccgtaggccaaaggtct

SEQ ID NO: 13869 - RNA, 22 nt, synthetic construct
  source 1..22: mol_type = other RNA
cgtcgcgtgctgtttcctcccc

SEQ ID NO: 13870 - RNA, 22 nt, synthetic construct
  source 1..22: mol_type = other RNA
cgtctaggcgcccgctaagttc

SEQ ID NO: 13871 - RNA, 22 nt, synthetic construct
  source 1..22: mol_type = other RNA
cgtgacttcccttctccaagtt

SEQ ID NO: 13872 - RNA, 22 nt, synthetic construct
  source 1..22: mol_type = other RNA
cgtgagattctccagagcaaac

SEQ ID NO: 13873 - RNA, 22 nt, synthetic construct
  source 1..22: mol_type = other RNA
cgtgcctgtggtcccagctgct

SEQ ID NO: 13874 - RNA, 22 nt, synthetic construct
  source 1..22: mol_type = other RNA
cgtgctgtttcctccccacggt

SEQ ID NO: 13875 - RNA, 22 nt, synthetic construct
  source 1..22: mol_type = other RNA
cgtggaggggcgcttggggtct

SEQ ID NO: 13876 - RNA, 22 nt, synthetic construct
  source 1..22: mol_type = other RNA
cgtgggcaacagagcgagaccc

SEQ ID NO: 13877 - RNA, 22 nt, synthetic construct
  source 1..22: mol_type = other RNA
cgtggggaggaaacagcacgcg

SEQ ID NO: 13878 - RNA, 22 nt, synthetic construct
  source 1..22: mol_type = other RNA
cgtggggctagtccagggctgg

SEQ ID NO: 13879 - RNA, 22 nt, synthetic construct
  source 1..22: mol_type = other RNA
cgttattgacatctttctgtgt

SEQ ID NO: 13880 - RNA, 22 nt, synthetic construct
  source 1..22: mol_type = other RNA
cgttcacaaacctcagcgccgc

SEQ ID NO: 13881 - RNA, 22 nt, synthetic construct
  source 1..22: mol_type = other RNA
cgtttgtagaatgcttggctgt

SEQ ID NO: 13882 - RNA, 22 nt, synthetic construct
  source 1..22: mol_type = other RNA
ctaaactttgtcccgaccctcc

SEQ ID NO: 13883 - RNA, 22 nt, synthetic construct
  source 1..22: mol_type = other RNA
ctaaccagggcttttgcgggag

SEQ ID NO: 13884 - RNA, 22 nt, synthetic construct
  source 1..22: mol_type = other RNA
ctaagctcaagagatcctcccg

SEQ ID NO: 13885 - RNA, 22 nt, synthetic construct
  source 1..22: mol_type = other RNA
ctaaggcaccgagattttaaga

SEQ ID NO: 13886 - RNA, 22 nt, synthetic construct
  source 1..22: mol_type = other RNA
ctaagggaagcagagccgcagc

SEQ ID NO: 13887 - RNA, 22 nt, synthetic construct
  source 1..22: mol_type = other RNA
ctaagttcgcatgtcctagcac

SEQ ID NO: 13888 - RNA, 22 nt, synthetic construct
  source 1..22: mol_type = other RNA
ctacaaacgtcgcgtgctgttt

SEQ ID NO: 13889 - RNA, 22 nt, synthetic construct
  source 1..22: mol_type = other RNA
ctaccacgcccaaccccctcat

SEQ ID NO: 13890 - RNA, 22 nt, synthetic construct
  source 1..22: mol_type = other RNA
ctacccgtcccccactccagct

SEQ ID NO: 13891 - RNA, 22 nt, synthetic construct
  source 1..22: mol_type = other RNA
ctacccgttattgacatctttc

SEQ ID NO: 13892 - RNA, 22 nt, synthetic construct
  source 1..22: mol_type = other RNA
ctaccctcccgctctggtcctt

SEQ ID NO: 13893 - RNA, 22 nt, synthetic construct
  source 1..22: mol_type = other RNA
ctacggacctcaagccatcctc

SEQ ID NO: 13894 - RNA, 22 nt, synthetic construct
  source 1..22: mol_type = other RNA
ctacggcgacgggagggtcggg

SEQ ID NO: 13895 - RNA, 22 nt, synthetic construct
  source 1..22: mol_type = other RNA
ctactatggttatcttctgcct

SEQ ID NO: 13896 - RNA, 22 nt, synthetic construct
  source 1..22: mol_type = other RNA
ctacttgcccctttcggcgggg

SEQ ID NO: 13897 - RNA, 22 nt, synthetic construct
  source 1..22: mol_type = other RNA
ctagacgaagtccacagctctc

SEQ ID NO: 13898 - RNA, 22 nt, synthetic construct
  source 1..22: mol_type = other RNA
ctagcacctctgggtctatgtg

SEQ ID NO: 13899 - RNA, 22 nt, synthetic construct
  source 1..22: mol_type = other RNA
ctagccccacggcgggccacca

SEQ ID NO: 13900 - RNA, 22 nt, synthetic construct
  source 1..22: mol_type = other RNA
ctaggacatgcgaacttagcgg

SEQ ID NO: 13901 - RNA, 22 nt, synthetic construct
  source 1..22: mol_type = other RNA
ctaggcgcccgctaagttcgca

SEQ ID NO: 13902 - RNA, 22 nt, synthetic construct
  source 1..22: mol_type = other RNA
ctagtccagggctggatctcgg

SEQ ID NO: 13903 - RNA, 22 nt, synthetic construct
  source 1..22: mol_type = other RNA
ctatcatggcgccagtgcactc

SEQ ID NO: 13904 - RNA, 22 nt, synthetic construct
  source 1..22: mol_type = other RNA
ctatggcggaagataactgttt

SEQ ID NO: 13905 - RNA, 22 nt, synthetic construct
  source 1..22: mol_type = other RNA
ctatggttatcttctgcctctc

SEQ ID NO: 13906 - RNA, 22 nt, synthetic construct
  source 1..22: mol_type = other RNA
ctatgtggggccacaccgtggg

SEQ ID NO: 13907 - RNA, 22 nt, synthetic construct
  source 1..22: mol_type = other RNA
ctcaaaagcctaagctcaagag

SEQ ID NO: 13908 - RNA, 22 nt, synthetic construct
  source 1..22: mol_type = other RNA
ctcaactacggacctcaagcca

SEQ ID NO: 13909 - RNA, 22 nt, synthetic construct
  source 1..22: mol_type = other RNA
ctcaagagatcctcccgcctca

SEQ ID NO: 13910 - RNA, 22 nt, synthetic construct
  source 1..22: mol_type = other RNA
ctcaagccatcctcccgcctcg

SEQ ID NO: 13911 - RNA, 22 nt, synthetic construct
  source 1..22: mol_type = other RNA
ctcacagatgaagaaactaagg

SEQ ID NO: 13912 - RNA, 22 nt, synthetic construct
  source 1..22: mol_type = other RNA
ctcacgcagaaggcaggcgttt

SEQ ID NO: 13913 - RNA, 22 nt, synthetic construct
  source 1..22: mol_type = other RNA
ctcagccaccggagcagctggg

SEQ ID NO: 13914 - RNA, 22 nt, synthetic construct
  source 1..22: mol_type = other RNA
ctcagcgccgcgcctttgggac

SEQ ID NO: 13915 - RNA, 22 nt, synthetic construct
  source 1..22: mol_type = other RNA
ctcatgttttcaaaaccgaaag

SEQ ID NO: 13916 - RNA, 22 nt, synthetic construct
  source 1..22: mol_type = other RNA
ctccaagttctccttggtggcc

SEQ ID NO: 13917 - RNA, 22 nt, synthetic construct
  source 1..22: mol_type = other RNA
ctccacgcgttcacaaacctca

SEQ ID NO: 13918 - RNA, 22 nt, synthetic construct
  source 1..22: mol_type = other RNA
ctccagagcaaactgggcggca

SEQ ID NO: 13919 - RNA, 22 nt, synthetic construct
  source 1..22: mol_type = other RNA
ctccagctgcgctgggggagcc

SEQ ID NO: 13920 - RNA, 22 nt, synthetic construct
  source 1..22: mol_type = other RNA
ctccagtctaagggaagcagag

SEQ ID NO: 13921 - RNA, 22 nt, synthetic construct
  source 1..22: mol_type = other RNA
ctcccaggccaccccgccgctt

SEQ ID NO: 13922 - RNA, 22 nt, synthetic construct
  source 1..22: mol_type = other RNA
ctccccacggtgtggccccaca

SEQ ID NO: 13923 - RNA, 22 nt, synthetic construct
  source 1..22: mol_type = other RNA
ctcccccaacctcggcgctctg

SEQ ID NO: 13924 - RNA, 22 nt, synthetic construct
  source 1..22: mol_type = other RNA
ctcccccagaccccaagcgccc

SEQ ID NO: 13925 - RNA, 22 nt, synthetic construct
  source 1..22: mol_type = other RNA
ctcccccagcgcagctggagtg

SEQ ID NO: 13926 - RNA, 22 nt, synthetic construct
  source 1..22: mol_type = other RNA
ctccccgccgaaaggggcaagt

SEQ ID NO: 13927 - RNA, 22 nt, synthetic construct
  source 1..22: mol_type = other RNA
ctcccctgctccccgccgaaag

SEQ ID NO: 13928 - RNA, 22 nt, synthetic construct
  source 1..22: mol_type = other RNA
ctcccgcaaaagccctggttag

SEQ ID NO: 13929 - RNA, 22 nt, synthetic construct
  source 1..22: mol_type = other RNA
ctcccgcctcagccaccggagc

SEQ ID NO: 13930 - RNA, 22 nt, synthetic construct
  source 1..22: mol_type = other RNA
ctcccgctctgcaccctctgtg

SEQ ID NO: 13931 - RNA, 22 nt, synthetic construct
  source 1..22: mol_type = other RNA
ctcccgctctggtccttcctct

SEQ ID NO: 13932 - RNA, 22 nt, synthetic construct
  source 1..22: mol_type = other RNA
ctcccgtcgccgtaggccaaag

SEQ ID NO: 13933 - RNA, 22 nt, synthetic construct
  source 1..22: mol_type = other RNA
ctccggtggctgaggcgggagg

SEQ ID NO: 13934 - RNA, 22 nt, synthetic construct
  source 1..22: mol_type = other RNA
ctccgtgacttcccttctccaa

SEQ ID NO: 13935 - RNA, 22 nt, synthetic construct
  source 1..22: mol_type = other RNA
ctcctaccctcccgctctggtc

SEQ ID NO: 13936 - RNA, 22 nt, synthetic construct
  source 1..22: mol_type = other RNA
ctccttggtggcccgccgtggg

SEQ ID NO: 13937 - RNA, 22 nt, synthetic construct
  source 1..22: mol_type = other RNA
ctcgattgctgccatttatccc

SEQ ID NO: 13938 - RNA, 22 nt, synthetic construct
  source 1..22: mol_type = other RNA
ctcgctccgtgacttcccttct

SEQ ID NO: 13939 - RNA, 22 nt, synthetic construct
  source 1..22: mol_type = other RNA
ctcgctctgttgcccacgctgg

SEQ ID NO: 13940 - RNA, 22 nt, synthetic construct
  source 1..22: mol_type = other RNA
ctcgctgtgctctctcgctccg

SEQ ID NO: 13941 - RNA, 22 nt, synthetic construct
  source 1..22: mol_type = other RNA
ctcggcgctctgacgcttatcg

SEQ ID NO: 13942 - RNA, 22 nt, synthetic construct
  source 1..22: mol_type = other RNA
ctcggtgccttagtttcttcat

SEQ ID NO: 13943 - RNA, 22 nt, synthetic construct
  source 1..22: mol_type = other RNA
ctcgtcccaaaggcgcggcgct

SEQ ID NO: 13944 - RNA, 22 nt, synthetic construct
  source 1..22: mol_type = other RNA
ctcgtgcctgtggtcccagctg

SEQ ID NO: 13945 - RNA, 22 nt, synthetic construct
  source 1..22: mol_type = other RNA
ctctcacagatgaagaaactaa

SEQ ID NO: 13946 - RNA, 22 nt, synthetic construct
  source 1..22: mol_type = other RNA
ctctccagtctaagggaagcag

SEQ ID NO: 13947 - RNA, 22 nt, synthetic construct
  source 1..22: mol_type = other RNA
ctctcccgctctgcaccctctg

SEQ ID NO: 13948 - RNA, 22 nt, synthetic construct
  source 1..22: mol_type = other RNA
ctctcctaccctcccgctctgg

SEQ ID NO: 13949 - RNA, 22 nt, synthetic construct
  source 1..22: mol_type = other RNA
ctctcgctccgtgacttccctt

SEQ ID NO: 13950 - RNA, 22 nt, synthetic construct
  source 1..22: mol_type = other RNA
ctctctcgctccgtgacttccc

SEQ ID NO: 13951 - RNA, 22 nt, synthetic construct
  source 1..22: mol_type = other RNA
ctctgacgcttatcgacgccct

SEQ ID NO: 13952 - RNA, 22 nt, synthetic construct
  source 1..22: mol_type = other RNA
ctctgcaccctctgtggccctc

SEQ ID NO: 13953 - RNA, 22 nt, synthetic construct
  source 1..22: mol_type = other RNA
ctctgcttcccttagactggag

SEQ ID NO: 13954 - RNA, 22 nt, synthetic construct
  source 1..22: mol_type = other RNA
ctctggagaatctcacgcagaa

SEQ ID NO: 13955 - RNA, 22 nt, synthetic construct
  source 1..22: mol_type = other RNA
ctctggctcccccagcgcagct

SEQ ID NO: 13956 - RNA, 22 nt, synthetic construct
  source 1..22: mol_type = other RNA
ctctgggtctatgtggggccac

SEQ ID NO: 13957 - RNA, 22 nt, synthetic construct
  source 1..22: mol_type = other RNA
ctctggtccttcctctcccgct

SEQ ID NO: 13958 - RNA, 22 nt, synthetic construct
  source 1..22: mol_type = other RNA
ctctgtacgaaaagaccacagg

SEQ ID NO: 13959 - RNA, 22 nt, synthetic construct
  source 1..22: mol_type = other RNA
ctctgtggccctcgctgtgctc

SEQ ID NO: 13960 - RNA, 22 nt, synthetic construct
  source 1..22: mol_type = other RNA
ctctgttgcccacgctggagtg

SEQ ID NO: 13961 - RNA, 22 nt, synthetic construct
  source 1..22: mol_type = other RNA
ctcttactttcggttttgaaaa

SEQ ID NO: 13962 - RNA, 22 nt, synthetic construct
  source 1..22: mol_type = other RNA
ctcttccgctctttcgcggggc

SEQ ID NO: 13963 - RNA, 22 nt, synthetic construct
  source 1..22: mol_type = other RNA
ctcttgagcttaggcttttgag

SEQ ID NO: 13964 - RNA, 22 nt, synthetic construct
  source 1..22: mol_type = other RNA
ctctttcgcggggcctctggct

SEQ ID NO: 13965 - RNA, 22 nt, synthetic construct
  source 1..22: mol_type = other RNA
ctctttgcctggttgtttccaa

SEQ ID NO: 13966 - RNA, 22 nt, synthetic construct
  source 1..22: mol_type = other RNA
ctctttggctctttgcctggtt

SEQ ID NO: 13967 - RNA, 22 nt, synthetic construct
  source 1..22: mol_type = other RNA
ctgacgcttatcgacgccctaa

SEQ ID NO: 13968 - RNA, 22 nt, synthetic construct
  source 1..22: mol_type = other RNA
ctgaggcgggaggatctcttga

SEQ ID NO: 13969 - RNA, 22 nt, synthetic construct
  source 1..22: mol_type = other RNA
ctgaggtttgtgaacgcgtgga

SEQ ID NO: 13970 - RNA, 22 nt, synthetic construct
  source 1..22: mol_type = other RNA
ctgcaccctctgtggccctcgc

SEQ ID NO: 13971 - RNA, 22 nt, synthetic construct
  source 1..22: mol_type = other RNA
ctgccatttatcccctgtgtaa

SEQ ID NO: 13972 - RNA, 22 nt, synthetic construct
  source 1..22: mol_type = other RNA
ctgcctctcacagatgaagaaa

SEQ ID NO: 13973 - RNA, 22 nt, synthetic construct
  source 1..22: mol_type = other RNA
ctgccttctgcgtgagattctc

SEQ ID NO: 13974 - RNA, 22 nt, synthetic construct
  source 1..22: mol_type = other RNA
ctgcgctgggggagccagaggc

SEQ ID NO: 13975 - RNA, 22 nt, synthetic construct
  source 1..22: mol_type = other RNA
ctgcggctctgcttcccttaga

SEQ ID NO: 13976 - RNA, 22 nt, synthetic construct
  source 1..22: mol_type = other RNA
ctgcgtgagattctccagagca

SEQ ID NO: 13977 - RNA, 22 nt, synthetic construct
  source 1..22: mol_type = other RNA
ctgctccccgccgaaaggggca

SEQ ID NO: 13978 - RNA, 22 nt, synthetic construct
  source 1..22: mol_type = other RNA
ctgctccggtggctgaggcggg

SEQ ID NO: 13979 - RNA, 22 nt, synthetic construct
  source 1..22: mol_type = other RNA
ctgctgcggctctgcttccctt

SEQ ID NO: 13980 - RNA, 22 nt, synthetic construct
  source 1..22: mol_type = other RNA
ctgcttcccttagactggagag

SEQ ID NO: 13981 - RNA, 22 nt, synthetic construct
  source 1..22: mol_type = other RNA
ctggactagccccacggcgggc

SEQ ID NO: 13982 - RNA, 22 nt, synthetic construct
  source 1..22: mol_type = other RNA
ctggagaatctcacgcagaagg

SEQ ID NO: 13983 - RNA, 22 nt, synthetic construct
  source 1..22: mol_type = other RNA
ctggagagctgtggacttcgtc

SEQ ID NO: 13984 - RNA, 22 nt, synthetic construct
  source 1..22: mol_type = other RNA
ctggagtgcactggcgccatga

SEQ ID NO: 13985 - RNA, 22 nt, synthetic construct
  source 1..22: mol_type = other RNA
ctggagtgggggacgggtaggc

SEQ ID NO: 13986 - RNA, 22 nt, synthetic construct
  source 1..22: mol_type = other RNA
ctggatctcggggaagcggcgg

SEQ ID NO: 13987 - RNA, 22 nt, synthetic construct
  source 1..22: mol_type = other RNA
ctggcgccatgatagctcaaaa

SEQ ID NO: 13988 - RNA, 22 nt, synthetic construct
  source 1..22: mol_type = other RNA
ctggctcccccagcgcagctgg

SEQ ID NO: 13989 - RNA, 22 nt, synthetic construct
  source 1..22: mol_type = other RNA
ctgggagtggggaagggggtgc

SEQ ID NO: 13990 - RNA, 22 nt, synthetic construct
  source 1..22: mol_type = other RNA
ctgggcggcatgggccctgtgg

SEQ ID NO: 13991 - RNA, 22 nt, synthetic construct
  source 1..22: mol_type = other RNA
ctgggtctatgtggggccacac

SEQ ID NO: 13992 - RNA, 22 nt, synthetic construct
  source 1..22: mol_type = other RNA
ctggtccttcctctcccgctct

SEQ ID NO: 13993 - RNA, 22 nt, synthetic construct
  source 1..22: mol_type = other RNA
ctggtctcaactacggacctca

SEQ ID NO: 13994 - RNA, 22 nt, synthetic construct
  source 1..22: mol_type = other RNA
ctggtctctacaaaaaataata

SEQ ID NO: 13995 - RNA, 22 nt, synthetic construct
  source 1..22: mol_type = other RNA
ctggttaggcttgacttcaatc

SEQ ID NO: 13996 - RNA, 22 nt, synthetic construct
  source 1..22: mol_type = other RNA
ctggttgtttccaagatgtact

SEQ ID NO: 13997 - RNA, 22 nt, synthetic construct
  source 1..22: mol_type = other RNA
ctgtacgaaaagaccacagggc

SEQ ID NO: 13998 - RNA, 22 nt, synthetic construct
  source 1..22: mol_type = other RNA
ctgtctgctgcggctctgcttc

SEQ ID NO: 13999 - RNA, 22 nt, synthetic construct
  source 1..22: mol_type = other RNA
ctgtgagaggcagaagataacc

SEQ ID NO: 14000 - RNA, 22 nt, synthetic construct
  source 1..22: mol_type = other RNA
ctgtgatacaaagcggtttcga

SEQ ID NO: 14001 - RNA, 22 nt, synthetic construct
  source 1..22: mol_type = other RNA
ctgtgcctcttactttcggttt

SEQ ID NO: 14002 - RNA, 22 nt, synthetic construct
  source 1..22: mol_type = other RNA
ctgtgctctctcgctccgtgac

SEQ ID NO: 14003 - RNA, 22 nt, synthetic construct
  source 1..22: mol_type = other RNA
ctgtggacttcgtctaggcgcc

SEQ ID NO: 14004 - RNA, 22 nt, synthetic construct
  source 1..22: mol_type = other RNA
ctgtggccctcgctgtgctctc

SEQ ID NO: 14005 - RNA, 22 nt, synthetic construct
  source 1..22: mol_type = other RNA
ctgtggtcccagctgctccggt

SEQ ID NO: 14006 - RNA, 22 nt, synthetic construct
  source 1..22: mol_type = other RNA
ctgtggtcttttcgtacagagg

SEQ ID NO: 14007 - RNA, 22 nt, synthetic construct
  source 1..22: mol_type = other RNA
ctgtgtgccaaggactttatgt

SEQ ID NO: 14008 - RNA, 22 nt, synthetic construct
  source 1..22: mol_type = other RNA
ctgttgcccacgctggagtgca

SEQ ID NO: 14009 - RNA, 22 nt, synthetic construct
  source 1..22: mol_type = other RNA
ctgtttcctccccacggtgtgg

SEQ ID NO: 14010 - RNA, 22 nt, synthetic construct
  source 1..22: mol_type = other RNA
ctgttttcaaaattaaatgacg

SEQ ID NO: 14011 - RNA, 22 nt, synthetic construct
  source 1..22: mol_type = other RNA
cttaaaatctcggtgccttagt

SEQ ID NO: 14012 - RNA, 22 nt, synthetic construct
  source 1..22: mol_type = other RNA
cttaattacacaggggataaat

SEQ ID NO: 14013 - RNA, 22 nt, synthetic construct
  source 1..22: mol_type = other RNA
cttacccgggcgacgcctcccc

SEQ ID NO: 14014 - RNA, 22 nt, synthetic construct
  source 1..22: mol_type = other RNA
cttactttcggttttgaaaaca

SEQ ID NO: 14015 - RNA, 22 nt, synthetic construct
  source 1..22: mol_type = other RNA
cttagactggagagctgtggac

SEQ ID NO: 14016 - RNA, 22 nt, synthetic construct
  source 1..22: mol_type = other RNA
cttagcgggcgcctagacgaag

SEQ ID NO: 14017 - RNA, 22 nt, synthetic construct
  source 1..22: mol_type = other RNA
cttaggcttttgagctatcatg

SEQ ID NO: 14018 - RNA, 22 nt, synthetic construct
  source 1..22: mol_type = other RNA
cttagggaggccgaggcgggag

SEQ ID NO: 14019 - RNA, 22 nt, synthetic construct
  source 1..22: mol_type = other RNA
cttagtttcttcatctgtgaga

SEQ ID NO: 14020 - RNA, 22 nt, synthetic construct
  source 1..22: mol_type = other RNA
cttatcgacgccctaaactttg

SEQ ID NO: 14021 - RNA, 22 nt, synthetic construct
  source 1..22: mol_type = other RNA
cttatttgttcccatcacatgt

SEQ ID NO: 14022 - RNA, 22 nt, synthetic construct
  source 1..22: mol_type = other RNA
cttcaatctcgattgctgccat

SEQ ID NO: 14023 - RNA, 22 nt, synthetic construct
  source 1..22: mol_type = other RNA
cttcatctgtgagaggcagaag

SEQ ID NO: 14024 - RNA, 22 nt, synthetic construct
  source 1..22: mol_type = other RNA
cttccccactcccaggccaccc

SEQ ID NO: 14025 - RNA, 22 nt, synthetic construct
  source 1..22: mol_type = other RNA
cttccccgagatccagccctgg

SEQ ID NO: 14026 - RNA, 22 nt, synthetic construct
  source 1..22: mol_type = other RNA
cttcccttagactggagagctg

SEQ ID NO: 14027 - RNA, 22 nt, synthetic construct
  source 1..22: mol_type = other RNA
cttcccttctccaagttctcct

SEQ ID NO: 14028 - RNA, 22 nt, synthetic construct
  source 1..22: mol_type = other RNA
cttccgccatagataactacta

SEQ ID NO: 14029 - RNA, 22 nt, synthetic construct
  source 1..22: mol_type = other RNA
cttccgctctttcgcggggcct

SEQ ID NO: 14030 - RNA, 22 nt, synthetic construct
  source 1..22: mol_type = other RNA
cttcctctcccgctctgcaccc

SEQ ID NO: 14031 - RNA, 22 nt, synthetic construct
  source 1..22: mol_type = other RNA
cttcctctttggctctttgcct

SEQ ID NO: 14032 - RNA, 22 nt, synthetic construct
  source 1..22: mol_type = other RNA
cttcgtctaggcgcccgctaag

SEQ ID NO: 14033 - RNA, 22 nt, synthetic construct
  source 1..22: mol_type = other RNA
cttctccaagttctccttggtg

SEQ ID NO: 14034 - RNA, 22 nt, synthetic construct
  source 1..22: mol_type = other RNA
cttctgcctctcacagatgaag

SEQ ID NO: 14035 - RNA, 22 nt, synthetic construct
  source 1..22: mol_type = other RNA
cttctgcgtgagattctccaga

SEQ ID NO: 14036 - RNA, 22 nt, synthetic construct
  source 1..22: mol_type = other RNA
cttgacttcaatctcgattgct

SEQ ID NO: 14037 - RNA, 22 nt, synthetic construct
  source 1..22: mol_type = other RNA
cttgagcttaggcttttgagct

SEQ ID NO: 14038 - RNA, 22 nt, synthetic construct
  source 1..22: mol_type = other RNA
cttgaggtccgtagttgagacc

SEQ ID NO: 14039 - RNA, 22 nt, synthetic construct
  source 1..22: mol_type = other RNA
cttgcccctttcggcggggagc

SEQ ID NO: 14040 - RNA, 22 nt, synthetic construct
  source 1..22: mol_type = other RNA
cttggaaacaaccaggcaaaga

SEQ ID NO: 14041 - RNA, 22 nt, synthetic construct
  source 1..22: mol_type = other RNA
cttggagaagggaagtcacgga

SEQ ID NO: 14042 - RNA, 22 nt, synthetic construct
  source 1..22: mol_type = other RNA
cttggcacacagaaagatgtca

SEQ ID NO: 14043 - RNA, 22 nt, synthetic construct
  source 1..22: mol_type = other RNA
cttggctgtgatacaaagcggt

SEQ ID NO: 14044 - RNA, 22 nt, synthetic construct
  source 1..22: mol_type = other RNA
cttggggtctgggggaggcgtc

SEQ ID NO: 14045 - RNA, 22 nt, synthetic construct
  source 1..22: mol_type = other RNA
cttggtggcccgccgtggggct

SEQ ID NO: 14046 - RNA, 22 nt, synthetic construct
  source 1..22: mol_type = other RNA
ctttatgtgctttgcgtcattt

SEQ ID NO: 14047 - RNA, 22 nt, synthetic construct
  source 1..22: mol_type = other RNA
ctttcgcggggcctctggctcc

SEQ ID NO: 14048 - RNA, 22 nt, synthetic construct
  source 1..22: mol_type = other RNA
ctttcggcggggagcaggggag

SEQ ID NO: 14049 - RNA, 22 nt, synthetic construct
  source 1..22: mol_type = other RNA
ctttcggttttgaaaacatgag

SEQ ID NO: 14050 - RNA, 22 nt, synthetic construct
  source 1..22: mol_type = other RNA
ctttctgtgtgccaaggacttt

SEQ ID NO: 14051 - RNA, 22 nt, synthetic construct
  source 1..22: mol_type = other RNA
ctttgcctggttgtttccaaga

SEQ ID NO: 14052 - RNA, 22 nt, synthetic construct
  source 1..22: mol_type = other RNA
ctttgcgtcatttaattttgaa

SEQ ID NO: 14053 - RNA, 22 nt, synthetic construct
  source 1..22: mol_type = other RNA
ctttggcctacggcgacgggag

SEQ ID NO: 14054 - RNA, 22 nt, synthetic construct
  source 1..22: mol_type = other RNA
ctttggctctttgcctggttgt

SEQ ID NO: 14055 - RNA, 22 nt, synthetic construct
  source 1..22: mol_type = other RNA
ctttgggacgagcctacccgtc

SEQ ID NO: 14056 - RNA, 22 nt, synthetic construct
  source 1..22: mol_type = other RNA
ctttgtatcacagccaagcatt

SEQ ID NO: 14057 - RNA, 22 nt, synthetic construct
  source 1..22: mol_type = other RNA
ctttgtcccgaccctcccgtcg

SEQ ID NO: 14058 - RNA, 22 nt, synthetic construct
  source 1..22: mol_type = other RNA
cttttcgtacagagggcttcct

SEQ ID NO: 14059 - RNA, 22 nt, synthetic construct
  source 1..22: mol_type = other RNA
cttttgagctatcatggcgcca

SEQ ID NO: 14060 - RNA, 22 nt, synthetic construct
  source 1..22: mol_type = other RNA
cttttgcgggagcgcatgcctt

SEQ ID NO: 14061 - RNA, 22 nt, synthetic construct
  source 1..22: mol_type = other RNA
cttttggctgtaattcgtgcat

SEQ ID NO: 14062 - RNA, 22 nt, synthetic construct
  source 1..22: mol_type = other RNA
gaaaaacgcctgccttctgcgt

SEQ ID NO: 14063 - RNA, 22 nt, synthetic construct
  source 1..22: mol_type = other RNA
gaaaacagttatcttccgccat

SEQ ID NO: 14064 - RNA, 22 nt, synthetic construct
  source 1..22: mol_type = other RNA
gaaaacatgagggggttgggcg

SEQ ID NO: 14065 - RNA, 22 nt, synthetic construct
  source 1..22: mol_type = other RNA
gaaaagaccacagggcccatgc

SEQ ID NO: 14066 - RNA, 22 nt, synthetic construct
  source 1..22: mol_type = other RNA
gaaacaaccaggcaaagagcca

SEQ ID NO: 14067 - RNA, 22 nt, synthetic construct
  source 1..22: mol_type = other RNA
gaaacagcacgcgacgtttgta

SEQ ID NO: 14068 - RNA, 22 nt, synthetic construct
  source 1..22: mol_type = other RNA
gaaaccctcccccaacctcggc

SEQ ID NO: 14069 - RNA, 22 nt, synthetic construct
  source 1..22: mol_type = other RNA
gaaaccgctttgtatcacagcc

SEQ ID NO: 14070 - RNA, 22 nt, synthetic construct
  source 1..22: mol_type = other RNA
gaaactaaggcaccgagatttt

SEQ ID NO: 14071 - RNA, 22 nt, synthetic construct
  source 1..22: mol_type = other RNA
gaaacttaattacacaggggat

SEQ ID NO: 14072 - RNA, 22 nt, synthetic construct
  source 1..22: mol_type = other RNA
gaaagagcggaagagaaaccct

SEQ ID NO: 14073 - RNA, 22 nt, synthetic construct
  source 1..22: mol_type = other RNA
gaaagatgtcaataacgggtag

SEQ ID NO: 14074 - RNA, 22 nt, synthetic construct
  source 1..22: mol_type = other RNA
gaaaggggcaagtagcgcgcgt

SEQ ID NO: 14075 - RNA, 22 nt, synthetic construct
  source 1..22: mol_type = other RNA
gaaagtaagaggcacagtacat

SEQ ID NO: 14076 - RNA, 22 nt, synthetic construct
  source 1..22: mol_type = other RNA
gaacgcgtggaggggcgcttgg

SEQ ID NO: 14077 - RNA, 22 nt, synthetic construct
  source 1..22: mol_type = other RNA
gaactacccgttattgacatct

SEQ ID NO: 14078 - RNA, 22 nt, synthetic construct
  source 1..22: mol_type = other RNA
gaacttagcgggcgcctagacg

SEQ ID NO: 14079 - RNA, 22 nt, synthetic construct
  source 1..22: mol_type = other RNA
gaacttggagaagggaagtcac

SEQ ID NO: 14080 - RNA, 22 nt, synthetic construct
  source 1..22: mol_type = other RNA
gaagaaactaaggcaccgagat

SEQ ID NO: 14081 - RNA, 22 nt, synthetic construct
  source 1..22: mol_type = other RNA
gaagagaaaccctcccccaacc

SEQ ID NO: 14082 - RNA, 22 nt, synthetic construct
  source 1..22: mol_type = other RNA
gaagataaccatagtagttatc

SEQ ID NO: 14083 - RNA, 22 nt, synthetic construct
  source 1..22: mol_type = other RNA
gaagcagagccgcagcagacag

SEQ ID NO: 14084 - RNA, 22 nt, synthetic construct
  source 1..22: mol_type = other RNA
gaagccctctgtacgaaaagac

SEQ ID NO: 14085 - RNA, 22 nt, synthetic construct
  source 1..22: mol_type = other RNA
gaagcctggtctctacaaaaaa

SEQ ID NO: 14086 - RNA, 22 nt, synthetic construct
  source 1..22: mol_type = other RNA
gaagcggcggggtggcctggga

SEQ ID NO: 14087 - RNA, 22 nt, synthetic construct
  source 1..22: mol_type = other RNA
gaaggaccagagcgggagggta

SEQ ID NO: 14088 - RNA, 22 nt, synthetic construct
  source 1..22: mol_type = other RNA
gaaggcaggcgtttttcttaaa

SEQ ID NO: 14089 - RNA, 22 nt, synthetic construct
  source 1..22: mol_type = other RNA
gaagggaagtcacggagcgaga

SEQ ID NO: 14090 - RNA, 22 nt, synthetic construct
  source 1..22: mol_type = other RNA
gaagggggtgcgcacccgggac

SEQ ID NO: 14091 - RNA, 22 nt, synthetic construct
  source 1..22: mol_type = other RNA
gaagtcaagcctaaccagggct

SEQ ID NO: 14092 - RNA, 22 nt, synthetic construct
  source 1..22: mol_type = other RNA
gaagtcacggagcgagagagca

SEQ ID NO: 14093 - RNA, 22 nt, synthetic construct
  source 1..22: mol_type = other RNA
gaagtccacagctctccagtct

SEQ ID NO: 14094 - RNA, 22 nt, synthetic construct
  source 1..22: mol_type = other RNA
gaatctcacgcagaaggcaggc

SEQ ID NO: 14095 - RNA, 22 nt, synthetic construct
  source 1..22: mol_type = other RNA
gaatgcttggctgtgatacaaa

SEQ ID NO: 14096 - RNA, 22 nt, synthetic construct
  source 1..22: mol_type = other RNA
gaattacagccaaaaggcatgc

SEQ ID NO: 14097 - RNA, 22 nt, synthetic construct
  source 1..22: mol_type = other RNA
gacaaagtttagggcgtcgata

SEQ ID NO: 14098 - RNA, 22 nt, synthetic construct
  source 1..22: mol_type = other RNA
gacaggcttacccgggcgacgc

SEQ ID NO: 14099 - RNA, 22 nt, synthetic construct
  source 1..22: mol_type = other RNA
gacatctttctgtgtgccaagg

SEQ ID NO: 14100 - RNA, 22 nt, synthetic construct
  source 1..22: mol_type = other RNA
gacatgcgaacttagcgggcgc

SEQ ID NO: 14101 - RNA, 22 nt, synthetic construct
  source 1..22: mol_type = other RNA
gacatgtgatgggaacaaataa

SEQ ID NO: 14102 - RNA, 22 nt, synthetic construct
  source 1..22: mol_type = other RNA
gaccacaggcacgagccaccac

SEQ ID NO: 14103 - RNA, 22 nt, synthetic construct
  source 1..22: mol_type = other RNA
gaccacagggcccatgccgccc

SEQ ID NO: 14104 - RNA, 22 nt, synthetic construct
  source 1..22: mol_type = other RNA
gaccagagcgggagggtaggag

SEQ ID NO: 14105 - RNA, 22 nt, synthetic construct
  source 1..22: mol_type = other RNA
gacccagaggtgctaggacatg

SEQ ID NO: 14106 - RNA, 22 nt, synthetic construct
  source 1..22: mol_type = other RNA
gaccccaagcgcccctccacgc

SEQ ID NO: 14107 - RNA, 22 nt, synthetic construct
  source 1..22: mol_type = other RNA
gaccctcccgtcgccgtaggcc

SEQ ID NO: 14108 - RNA, 22 nt, synthetic construct
  source 1..22: mol_type = other RNA
gacctcaagccatcctcccgcc

SEQ ID NO: 14109 - RNA, 22 nt, synthetic construct
  source 1..22: mol_type = other RNA
gacctttggcctacggcgacgg

SEQ ID NO: 14110 - RNA, 22 nt, synthetic construct
  source 1..22: mol_type = other RNA
gacgaagtccacagctctccag

SEQ ID NO: 14111 - RNA, 22 nt, synthetic construct
  source 1..22: mol_type = other RNA
gacgagcctacccgtcccccac

SEQ ID NO: 14112 - RNA, 22 nt, synthetic construct
  source 1..22: mol_type = other RNA
gacgcaaagcacataaagtcct

SEQ ID NO: 14113 - RNA, 22 nt, synthetic construct
  source 1..22: mol_type = other RNA
gacgccctaaactttgtcccga

SEQ ID NO: 14114 - RNA, 22 nt, synthetic construct
  source 1..22: mol_type = other RNA
gacgcctcccccagaccccaag

SEQ ID NO: 14115 - RNA, 22 nt, synthetic construct
  source 1..22: mol_type = other RNA
gacgcgcgctacttgccccttt

SEQ ID NO: 14116 - RNA, 22 nt, synthetic construct
  source 1..22: mol_type = other RNA
gacgcttatcgacgccctaaac

SEQ ID NO: 14117 - RNA, 22 nt, synthetic construct
  source 1..22: mol_type = other RNA
gacgggagggtcgggacaaagt

SEQ ID NO: 14118 - RNA, 22 nt, synthetic construct
  source 1..22: mol_type = other RNA
gacgggtaggctcgtcccaaag

SEQ ID NO: 14119 - RNA, 22 nt, synthetic construct
  source 1..22: mol_type = other RNA
gacgtttgtagaatgcttggct

SEQ ID NO: 14120 - RNA, 22 nt, synthetic construct
  source 1..22: mol_type = other RNA
gactagccccacggcgggccac

SEQ ID NO: 14121 - RNA, 22 nt, synthetic construct
  source 1..22: mol_type = other RNA
gactggagagctgtggacttcg

SEQ ID NO: 14122 - RNA, 22 nt, synthetic construct
  source 1..22: mol_type = other RNA
gacttcaatctcgattgctgcc

SEQ ID NO: 14123 - RNA, 22 nt, synthetic construct
  source 1..22: mol_type = other RNA
gacttcccttctccaagttctc

SEQ ID NO: 14124 - RNA, 22 nt, synthetic construct
  source 1..22: mol_type = other RNA
gacttcgtctaggcgcccgcta

SEQ ID NO: 14125 - RNA, 22 nt, synthetic construct
  source 1..22: mol_type = other RNA
gactttatgtgctttgcgtcat

SEQ ID NO: 14126 - RNA, 22 nt, synthetic construct
  source 1..22: mol_type = other RNA
gagaaaccctcccccaacctcg

SEQ ID NO: 14127 - RNA, 22 nt, synthetic construct
  source 1..22: mol_type = other RNA
gagaacttggagaagggaagtc

SEQ ID NO: 14128 - RNA, 22 nt, synthetic construct
  source 1..22: mol_type = other RNA
gagaagggaagtcacggagcga

SEQ ID NO: 14129 - RNA, 22 nt, synthetic construct
  source 1..22: mol_type = other RNA
gagaatctcacgcagaaggcag

SEQ ID NO: 14130 - RNA, 22 nt, synthetic construct
  source 1..22: mol_type = other RNA
gagacctttggcctacggcgac

SEQ ID NO: 14131 - RNA, 22 nt, synthetic construct
  source 1..22: mol_type = other RNA
gagagacagggtctcgctctgt

SEQ ID NO: 14132 - RNA, 22 nt, synthetic construct
  source 1..22: mol_type = other RNA
gagagagcacagcgagggccac

SEQ ID NO: 14133 - RNA, 22 nt, synthetic construct
  source 1..22: mol_type = other RNA
gagagcacagcgagggccacag

SEQ ID NO: 14134 - RNA, 22 nt, synthetic construct
  source 1..22: mol_type = other RNA
gagagctgtggacttcgtctag

SEQ ID NO: 14135 - RNA, 22 nt, synthetic construct
  source 1..22: mol_type = other RNA
gagaggaaggaccagagcggga

SEQ ID NO: 14136 - RNA, 22 nt, synthetic construct
  source 1..22: mol_type = other RNA
gagaggcagaagataaccatag

SEQ ID NO: 14137 - RNA, 22 nt, synthetic construct
  source 1..22: mol_type = other RNA
gagatccagccctggactagcc

SEQ ID NO: 14138 - RNA, 22 nt, synthetic construct
  source 1..22: mol_type = other RNA
gagatcctcccgcctcagccac

SEQ ID NO: 14139 - RNA, 22 nt, synthetic construct
  source 1..22: mol_type = other RNA
gagattctccagagcaaactgg

SEQ ID NO: 14140 - RNA, 22 nt, synthetic construct
  source 1..22: mol_type = other RNA
gagattgaagtcaagcctaacc

SEQ ID NO: 14141 - RNA, 22 nt, synthetic construct
  source 1..22: mol_type = other RNA
gagcaaactgggcggcatgggc

SEQ ID NO: 14142 - RNA, 22 nt, synthetic construct
  source 1..22: mol_type = other RNA
gagcacagcgagggccacagag

SEQ ID NO: 14143 - RNA, 22 nt, synthetic construct
  source 1..22: mol_type = other RNA
gagcagctgggaccacaggcac

SEQ ID NO: 14144 - RNA, 22 nt, synthetic construct
  source 1..22: mol_type = other RNA
gagcaggggagacctttggcct

SEQ ID NO: 14145 - RNA, 22 nt, synthetic construct
  source 1..22: mol_type = other RNA
gagccaaagaggaagccctctg

SEQ ID NO: 14146 - RNA, 22 nt, synthetic construct
  source 1..22: mol_type = other RNA
gagccaccacacccggctaatt

SEQ ID NO: 14147 - RNA, 22 nt, synthetic construct
  source 1..22: mol_type = other RNA
gagccagaggccccgcgaaaga

SEQ ID NO: 14148 - RNA, 22 nt, synthetic construct
  source 1..22: mol_type = other RNA
gagccgcagcagacaggcttac

SEQ ID NO: 14149 - RNA, 22 nt, synthetic construct
  source 1..22: mol_type = other RNA
gagcctacccgtcccccactcc

SEQ ID NO: 14150 - RNA, 22 nt, synthetic construct
  source 1..22: mol_type = other RNA
gagcgagagagcacagcgaggg

SEQ ID NO: 14151 - RNA, 22 nt, synthetic construct
  source 1..22: mol_type = other RNA
gagcgcatgccttttggctgta

SEQ ID NO: 14152 - RNA, 22 nt, synthetic construct
  source 1..22: mol_type = other RNA
gagcgccgaggttgggggaggg

SEQ ID NO: 14153 - RNA, 22 nt, synthetic construct
  source 1..22: mol_type = other RNA
gagcggaagagaaaccctcccc

SEQ ID NO: 14154 - RNA, 22 nt, synthetic construct
  source 1..22: mol_type = other RNA
gagcgggagaggaaggaccaga

SEQ ID NO: 14155 - RNA, 22 nt, synthetic construct
  source 1..22: mol_type = other RNA
gagctatcatggcgccagtgca

SEQ ID NO: 14156 - RNA, 22 nt, synthetic construct
  source 1..22: mol_type = other RNA
gagctgtggacttcgtctaggc

SEQ ID NO: 14157 - RNA, 22 nt, synthetic construct
  source 1..22: mol_type = other RNA
gagcttaggcttttgagctatc

SEQ ID NO: 14158 - RNA, 22 nt, synthetic construct
  source 1..22: mol_type = other RNA
gaggaaacagcacgcgacgttt

SEQ ID NO: 14159 - RNA, 22 nt, synthetic construct
  source 1..22: mol_type = other RNA
gaggaagccctctgtacgaaaa

SEQ ID NO: 14160 - RNA, 22 nt, synthetic construct
  source 1..22: mol_type = other RNA
gaggaaggaccagagcgggagg

SEQ ID NO: 14161 - RNA, 22 nt, synthetic construct
  source 1..22: mol_type = other RNA
gaggatctcttgagcttaggct

SEQ ID NO: 14162 - RNA, 22 nt, synthetic construct
  source 1..22: mol_type = other RNA
gaggatggcttgaggtccgtag

SEQ ID NO: 14163 - RNA, 22 nt, synthetic construct
  source 1..22: mol_type = other RNA
gaggcacagtacatcttggaaa

SEQ ID NO: 14164 - RNA, 22 nt, synthetic construct
  source 1..22: mol_type = other RNA
gaggcagaagataaccatagta

SEQ ID NO: 14165 - RNA, 22 nt, synthetic construct
  source 1..22: mol_type = other RNA
gaggccccgcgaaagagcggaa

SEQ ID NO: 14166 - RNA, 22 nt, synthetic construct
  source 1..22: mol_type = other RNA
gaggccgaggcgggaggatggc

SEQ ID NO: 14167 - RNA, 22 nt, synthetic construct
  source 1..22: mol_type = other RNA
gaggcgggaggatctcttgagc

SEQ ID NO: 14168 - RNA, 22 nt, synthetic construct
  source 1..22: mol_type = other RNA
gaggcgggaggatggcttgagg

SEQ ID NO: 14169 - RNA, 22 nt, synthetic construct
  source 1..22: mol_type = other RNA
gaggcgtcgcccgggtaagcct

SEQ ID NO: 14170 - RNA, 22 nt, synthetic construct
  source 1..22: mol_type = other RNA
gagggccacagagggtgcagag

SEQ ID NO: 14171 - RNA, 22 nt, synthetic construct
  source 1..22: mol_type = other RNA
gagggcttcctctttggctctt

SEQ ID NO: 14172 - RNA, 22 nt, synthetic construct
  source 1..22: mol_type = other RNA
gaggggcgcttggggtctgggg

SEQ ID NO: 14173 - RNA, 22 nt, synthetic construct
  source 1..22: mol_type = other RNA
gagggggttgggcgtggtagct

SEQ ID NO: 14174 - RNA, 22 nt, synthetic construct
  source 1..22: mol_type = other RNA
gagggtcgggacaaagtttagg

SEQ ID NO: 14175 - RNA, 22 nt, synthetic construct
  source 1..22: mol_type = other RNA
gagggtgcagagcgggagagga

SEQ ID NO: 14176 - RNA, 22 nt, synthetic construct
  source 1..22: mol_type = other RNA
gagggtttctcttccgctcttt

SEQ ID NO: 14177 - RNA, 22 nt, synthetic construct
  source 1..22: mol_type = other RNA
gaggtccgtagttgagaccagc

SEQ ID NO: 14178 - RNA, 22 nt, synthetic construct
  source 1..22: mol_type = other RNA
gaggtgctaggacatgcgaact

SEQ ID NO: 14179 - RNA, 22 nt, synthetic construct
  source 1..22: mol_type = other RNA
gaggttgggggagggtttctct

SEQ ID NO: 14180 - RNA, 22 nt, synthetic construct
  source 1..22: mol_type = other RNA
gaggtttgtgaacgcgtggagg

SEQ ID NO: 14181 - RNA, 22 nt, synthetic construct
  source 1..22: mol_type = other RNA
gagtctctcctaccctcccgct

SEQ ID NO: 14182 - RNA, 22 nt, synthetic construct
  source 1..22: mol_type = other RNA
gagtgcactggcgccatgatag

SEQ ID NO: 14183 - RNA, 22 nt, synthetic construct
  source 1..22: mol_type = other RNA
gagtggggaagggggtgcgcac

SEQ ID NO: 14184 - RNA, 22 nt, synthetic construct
  source 1..22: mol_type = other RNA
gagtgggggacgggtaggctcg

SEQ ID NO: 14185 - RNA, 22 nt, synthetic construct
  source 1..22: mol_type = other RNA
gataaatggcagcaatcgagat

SEQ ID NO: 14186 - RNA, 22 nt, synthetic construct
  source 1..22: mol_type = other RNA
gataaccatagtagttatctat

SEQ ID NO: 14187 - RNA, 22 nt, synthetic construct
  source 1..22: mol_type = other RNA
gataactactatggttatcttc

SEQ ID NO: 14188 - RNA, 22 nt, synthetic construct
  source 1..22: mol_type = other RNA
gataagcgtcagagcgccgagg

SEQ ID NO: 14189 - RNA, 22 nt, synthetic construct
  source 1..22: mol_type = other RNA
gatacaaagcggtttcgaataa

SEQ ID NO: 14190 - RNA, 22 nt, synthetic construct
  source 1..22: mol_type = other RNA
gatagctcaaaagcctaagctc

SEQ ID NO: 14191 - RNA, 22 nt, synthetic construct
  source 1..22: mol_type = other RNA
gatccagccctggactagcccc

SEQ ID NO: 14192 - RNA, 22 nt, synthetic construct
  source 1..22: mol_type = other RNA
gatcctcccgcctcagccaccg

SEQ ID NO: 14193 - RNA, 22 nt, synthetic construct
  source 1..22: mol_type = other RNA
gatctcggggaagcggcggggt

SEQ ID NO: 14194 - RNA, 22 nt, synthetic construct
  source 1..22: mol_type = other RNA
gatctcttgagcttaggctttt

SEQ ID NO: 14195 - RNA, 22 nt, synthetic construct
  source 1..22: mol_type = other RNA
gatgaagaaactaaggcaccga

SEQ ID NO: 14196 - RNA, 22 nt, synthetic construct
  source 1..22: mol_type = other RNA
gatggcttgaggtccgtagttg

SEQ ID NO: 14197 - RNA, 22 nt, synthetic construct
  source 1..22: mol_type = other RNA
gatgggaacaaataagttaatt

SEQ ID NO: 14198 - RNA, 22 nt, synthetic construct
  source 1..22: mol_type = other RNA
gatgtactgtgcctcttacttt

SEQ ID NO: 14199 - RNA, 22 nt, synthetic construct
  source 1..22: mol_type = other RNA
gatgtcaataacgggtagttct

SEQ ID NO: 14200 - RNA, 22 nt, synthetic construct
  source 1..22: mol_type = other RNA
gattacaggcgtaagctaccac

SEQ ID NO: 14201 - RNA, 22 nt, synthetic construct
  source 1..22: mol_type = other RNA
gattctccagagcaaactgggc

SEQ ID NO: 14202 - RNA, 22 nt, synthetic construct
  source 1..22: mol_type = other RNA
gattgaagtcaagcctaaccag

SEQ ID NO: 14203 - RNA, 22 nt, synthetic construct
  source 1..22: mol_type = other RNA
gattgctgccatttatcccctg

SEQ ID NO: 14204 - RNA, 22 nt, synthetic construct
  source 1..22: mol_type = other RNA
gcaaaagccctggttaggcttg

SEQ ID NO: 14205 - RNA, 22 nt, synthetic construct
  source 1..22: mol_type = other RNA
gcaaactgggcggcatgggccc

SEQ ID NO: 14206 - RNA, 22 nt, synthetic construct
  source 1..22: mol_type = other RNA
gcaaagagccaaagaggaagcc

SEQ ID NO: 14207 - RNA, 22 nt, synthetic construct
  source 1..22: mol_type = other RNA
gcaaagcacataaagtccttgg

SEQ ID NO: 14208 - RNA, 22 nt, synthetic construct
  source 1..22: mol_type = other RNA
gcaagtagcgcgcgtcccgggt

SEQ ID NO: 14209 - RNA, 22 nt, synthetic construct
  source 1..22: mol_type = other RNA
gcaatcgagattgaagtcaagc

SEQ ID NO: 14210 - RNA, 22 nt, synthetic construct
  source 1..22: mol_type = other RNA
gcacacagaaagatgtcaataa

SEQ ID NO: 14211 - RNA, 22 nt, synthetic construct
  source 1..22: mol_type = other RNA
gcacagcgagggccacagaggg

SEQ ID NO: 14212 - RNA, 22 nt, synthetic construct
  source 1..22: mol_type = other RNA
gcacagtacatcttggaaacaa

SEQ ID NO: 14213 - RNA, 22 nt, synthetic construct
  source 1..22: mol_type = other RNA
gcacataaagtccttggcacac

SEQ ID NO: 14214 - RNA, 22 nt, synthetic construct
  source 1..22: mol_type = other RNA
gcacccccttccccactcccag

SEQ ID NO: 14215 - RNA, 22 nt, synthetic construct
  source 1..22: mol_type = other RNA
gcacccgggacgcgcgctactt

SEQ ID NO: 14216 - RNA, 22 nt, synthetic construct
  source 1..22: mol_type = other RNA
gcaccctctgtggccctcgctg

SEQ ID NO: 14217 - RNA, 22 nt, synthetic construct
  source 1..22: mol_type = other RNA
gcaccgagattttaagaaactt

SEQ ID NO: 14218 - RNA, 22 nt, synthetic construct
  source 1..22: mol_type = other RNA
gcacctctgggtctatgtgggg

SEQ ID NO: 14219 - RNA, 22 nt, synthetic construct
  source 1..22: mol_type = other RNA
gcacgaattacagccaaaaggc

SEQ ID NO: 14220 - RNA, 22 nt, synthetic construct
  source 1..22: mol_type = other RNA
gcacgcgacgtttgtagaatgc

SEQ ID NO: 14221 - RNA, 22 nt, synthetic construct
  source 1..22: mol_type = other RNA
gcactggcgccatgatagctca

SEQ ID NO: 14222 - RNA, 22 nt, synthetic construct
  source 1..22: mol_type = other RNA
gcacttagggaggccgaggcgg

SEQ ID NO: 14223 - RNA, 22 nt, synthetic construct
  source 1..22: mol_type = other RNA
gcagaagataaccatagtagtt

SEQ ID NO: 14224 - RNA, 22 nt, synthetic construct
  source 1..22: mol_type = other RNA
gcagaaggcaggcgtttttctt

SEQ ID NO: 14225 - RNA, 22 nt, synthetic construct
  source 1..22: mol_type = other RNA
gcagacaggcttacccgggcga

SEQ ID NO: 14226 - RNA, 22 nt, synthetic construct
  source 1..22: mol_type = other RNA
gcagagccgcagcagacaggct

SEQ ID NO: 14227 - RNA, 22 nt, synthetic construct
  source 1..22: mol_type = other RNA
gcagagcgggagaggaaggacc

SEQ ID NO: 14228 - RNA, 22 nt, synthetic construct
  source 1..22: mol_type = other RNA
gcagcaatcgagattgaagtca

SEQ ID NO: 14229 - RNA, 22 nt, synthetic construct
  source 1..22: mol_type = other RNA
gcagcagacaggcttacccggg

SEQ ID NO: 14230 - RNA, 22 nt, synthetic construct
  source 1..22: mol_type = other RNA
gcagctggagtgggggacgggt

SEQ ID NO: 14231 - RNA, 22 nt, synthetic construct
  source 1..22: mol_type = other RNA
gcagctgggaccacaggcacga

SEQ ID NO: 14232 - RNA, 22 nt, synthetic construct
  source 1..22: mol_type = other RNA
gcaggggagacctttggcctac

SEQ ID NO: 14233 - RNA, 22 nt, synthetic construct
  source 1..22: mol_type = other RNA
gcatgccttttggctgtaattc

SEQ ID NO: 14234 - RNA, 22 nt, synthetic construct
  source 1..22: mol_type = other RNA
gcatgcgctcccgcaaaagccc

SEQ ID NO: 14235 - RNA, 22 nt, synthetic construct
  source 1..22: mol_type = other RNA
gcatgggccctgtggtcttttc

SEQ ID NO: 14236 - RNA, 22 nt, synthetic construct
  source 1..22: mol_type = other RNA
gcatgtcctagcacctctgggt

SEQ ID NO: 14237 - RNA, 22 nt, synthetic construct
  source 1..22: mol_type = other RNA
gcattctacaaacgtcgcgtgc

SEQ ID NO: 14238 - RNA, 22 nt, synthetic construct
  source 1..22: mol_type = other RNA
gccaaaaggcatgcgctcccgc

SEQ ID NO: 14239 - RNA, 22 nt, synthetic construct
  source 1..22: mol_type = other RNA
gccaaagaggaagccctctgta

SEQ ID NO: 14240 - RNA, 22 nt, synthetic construct
  source 1..22: mol_type = other RNA
gccaaaggtctcccctgctccc

SEQ ID NO: 14241 - RNA, 22 nt, synthetic construct
  source 1..22: mol_type = other RNA
gccaacatggtgaagcctggtc

SEQ ID NO: 14242 - RNA, 22 nt, synthetic construct
  source 1..22: mol_type = other RNA
gccaagcattctacaaacgtcg

SEQ ID NO: 14243 - RNA, 22 nt, synthetic construct
  source 1..22: mol_type = other RNA
gccaaggactttatgtgctttg

SEQ ID NO: 14244 - RNA, 22 nt, synthetic construct
  source 1..22: mol_type = other RNA
gccacaccgtggggaggaaaca

SEQ ID NO: 14245 - RNA, 22 nt, synthetic construct
  source 1..22: mol_type = other RNA
gccacagagggtgcagagcggg

SEQ ID NO: 14246 - RNA, 22 nt, synthetic construct
  source 1..22: mol_type = other RNA
gccaccaaggagaacttggaga

SEQ ID NO: 14247 - RNA, 22 nt, synthetic construct
  source 1..22: mol_type = other RNA
gccaccacacccggctaatttt

SEQ ID NO: 14248 - RNA, 22 nt, synthetic construct
  source 1..22: mol_type = other RNA
gccaccggagcagctgggacca

SEQ ID NO: 14249 - RNA, 22 nt, synthetic construct
  source 1..22: mol_type = other RNA
gccagaggccccgcgaaagagc

SEQ ID NO: 14250 - RNA, 22 nt, synthetic construct
  source 1..22: mol_type = other RNA
gccaggctggtctcaactacgg

SEQ ID NO: 14251 - RNA, 22 nt, synthetic construct
  source 1..22: mol_type = other RNA
gccagtgcactccagcgtgggc

SEQ ID NO: 14252 - RNA, 22 nt, synthetic construct
  source 1..22: mol_type = other RNA
gccatagataactactatggtt

SEQ ID NO: 14253 - RNA, 22 nt, synthetic construct
  source 1..22: mol_type = other RNA
gccatcctcccgcctcggcctc

SEQ ID NO: 14254 - RNA, 22 nt, synthetic construct
  source 1..22: mol_type = other RNA
gccatgatagctcaaaagccta

SEQ ID NO: 14255 - RNA, 22 nt, synthetic construct
  source 1..22: mol_type = other RNA
gccatttatcccctgtgtaatt

SEQ ID NO: 14256 - RNA, 22 nt, synthetic construct
  source 1..22: mol_type = other RNA
gcccaaccccctcatgttttca

SEQ ID NO: 14257 - RNA, 22 nt, synthetic construct
  source 1..22: mol_type = other RNA
gcccacgctggagtgcactggc

SEQ ID NO: 14258 - RNA, 22 nt, synthetic construct
  source 1..22: mol_type = other RNA
gcccagtttgctctggagaatc

SEQ ID NO: 14259 - RNA, 22 nt, synthetic construct
  source 1..22: mol_type = other RNA
gcccatgccgcccagtttgctc

SEQ ID NO: 14260 - RNA, 22 nt, synthetic construct
  source 1..22: mol_type = other RNA
gccccacatagacccagaggtg

SEQ ID NO: 14261 - RNA, 22 nt, synthetic construct
  source 1..22: mol_type = other RNA
gccccgcgaaagagcggaagag

SEQ ID NO: 14262 - RNA, 22 nt, synthetic construct
  source 1..22: mol_type = other RNA
gcccctccacgcgttcacaaac

SEQ ID NO: 14263 - RNA, 22 nt, synthetic construct
  source 1..22: mol_type = other RNA
gcccctttcggcggggagcagg

SEQ ID NO: 14264 - RNA, 22 nt, synthetic construct
  source 1..22: mol_type = other RNA
gcccgccgtggggctagtccag

SEQ ID NO: 14265 - RNA, 22 nt, synthetic construct
  source 1..22: mol_type = other RNA
gcccgctaagttcgcatgtcct

SEQ ID NO: 14266 - RNA, 22 nt, synthetic construct
  source 1..22: mol_type = other RNA
gcccgggtaagcctgtctgctg

SEQ ID NO: 14267 - RNA, 22 nt, synthetic construct
  source 1..22: mol_type = other RNA
gccctaaactttgtcccgaccc

SEQ ID NO: 14268 - RNA, 22 nt, synthetic construct
  source 1..22: mol_type = other RNA
gccctcgctgtgctctctcgct

SEQ ID NO: 14269 - RNA, 22 nt, synthetic construct
  source 1..22: mol_type = other RNA
gccctctgtacgaaaagaccac

SEQ ID NO: 14270 - RNA, 22 nt, synthetic construct
  source 1..22: mol_type = other RNA
gccctggactagccccacggcg

SEQ ID NO: 14271 - RNA, 22 nt, synthetic construct
  source 1..22: mol_type = other RNA
gccctggttaggcttgacttca

SEQ ID NO: 14272 - RNA, 22 nt, synthetic construct
  source 1..22: mol_type = other RNA
gccctgtggtcttttcgtacag

SEQ ID NO: 14273 - RNA, 22 nt, synthetic construct
  source 1..22: mol_type = other RNA
gccgaaaggggcaagtagcgcg

SEQ ID NO: 14274 - RNA, 22 nt, synthetic construct
  source 1..22: mol_type = other RNA
gccgaggcgggaggatggcttg

SEQ ID NO: 14275 - RNA, 22 nt, synthetic construct
  source 1..22: mol_type = other RNA
gccgaggttgggggagggtttc

SEQ ID NO: 14276 - RNA, 22 nt, synthetic construct
  source 1..22: mol_type = other RNA
gccgcagcagacaggcttaccc

SEQ ID NO: 14277 - RNA, 22 nt, synthetic construct
  source 1..22: mol_type = other RNA
gccgcccagtttgctctggaga

SEQ ID NO: 14278 - RNA, 22 nt, synthetic construct
  source 1..22: mol_type = other RNA
gccgcgcctttgggacgagcct

SEQ ID NO: 14279 - RNA, 22 nt, synthetic construct
  source 1..22: mol_type = other RNA
gccgcttccccgagatccagcc

SEQ ID NO: 14280 - RNA, 22 nt, synthetic construct
  source 1..22: mol_type = other RNA
gccgggtgtggtggctcgtgcc

SEQ ID NO: 14281 - RNA, 22 nt, synthetic construct
  source 1..22: mol_type = other RNA
gccgtaggccaaaggtctcccc

SEQ ID NO: 14282 - RNA, 22 nt, synthetic construct
  source 1..22: mol_type = other RNA
gccgtggggctagtccagggct

SEQ ID NO: 14283 - RNA, 22 nt, synthetic construct
  source 1..22: mol_type = other RNA
gcctaaccagggcttttgcggg

SEQ ID NO: 14284 - RNA, 22 nt, synthetic construct
  source 1..22: mol_type = other RNA
gcctaagctcaagagatcctcc

SEQ ID NO: 14285 - RNA, 22 nt, synthetic construct
  source 1..22: mol_type = other RNA
gcctacccgtcccccactccag

SEQ ID NO: 14286 - RNA, 22 nt, synthetic construct
  source 1..22: mol_type = other RNA
gcctacggcgacgggagggtcg

SEQ ID NO: 14287 - RNA, 22 nt, synthetic construct
  source 1..22: mol_type = other RNA
gcctagacgaagtccacagctc

SEQ ID NO: 14288 - RNA, 22 nt, synthetic construct
  source 1..22: mol_type = other RNA
gcctcagccaccggagcagctg

SEQ ID NO: 14289 - RNA, 22 nt, synthetic construct
  source 1..22: mol_type = other RNA
gcctcccccagaccccaagcgc

SEQ ID NO: 14290 - RNA, 22 nt, synthetic construct
  source 1..22: mol_type = other RNA
gcctctcacagatgaagaaact

SEQ ID NO: 14291 - RNA, 22 nt, synthetic construct
  source 1..22: mol_type = other RNA
gcctctggctcccccagcgcag

SEQ ID NO: 14292 - RNA, 22 nt, synthetic construct
  source 1..22: mol_type = other RNA
gcctcttactttcggttttgaa

SEQ ID NO: 14293 - RNA, 22 nt, synthetic construct
  source 1..22: mol_type = other RNA
gcctgccttctgcgtgagattc

SEQ ID NO: 14294 - RNA, 22 nt, synthetic construct
  source 1..22: mol_type = other RNA
gcctgggagtggggaagggggt

SEQ ID NO: 14295 - RNA, 22 nt, synthetic construct
  source 1..22: mol_type = other RNA
gcctggtctctacaaaaaataa

SEQ ID NO: 14296 - RNA, 22 nt, synthetic construct
  source 1..22: mol_type = other RNA
gcctggttgtttccaagatgta

SEQ ID NO: 14297 - RNA, 22 nt, synthetic construct
  source 1..22: mol_type = other RNA
gcctgtctgctgcggctctgct

SEQ ID NO: 14298 - RNA, 22 nt, synthetic construct
  source 1..22: mol_type = other RNA
gcctgtggtcccagctgctccg

SEQ ID NO: 14299 - RNA, 22 nt, synthetic construct
  source 1..22: mol_type = other RNA
gccttagtttcttcatctgtga

SEQ ID NO: 14300 - RNA, 22 nt, synthetic construct
  source 1..22: mol_type = other RNA
gccttctgcgtgagattctcca

SEQ ID NO: 14301 - RNA, 22 nt, synthetic construct
  source 1..22: mol_type = other RNA
gcctttgggacgagcctacccg

SEQ ID NO: 14302 - RNA, 22 nt, synthetic construct
  source 1..22: mol_type = other RNA
gccttttggctgtaattcgtgc

SEQ ID NO: 14303 - RNA, 22 nt, synthetic construct
  source 1..22: mol_type = other RNA
gcgaaagagcggaagagaaacc

SEQ ID NO: 14304 - RNA, 22 nt, synthetic construct
  source 1..22: mol_type = other RNA
gcgaacttagcgggcgcctaga

SEQ ID NO: 14305 - RNA, 22 nt, synthetic construct
  source 1..22: mol_type = other RNA
gcgacgcctcccccagacccca

SEQ ID NO: 14306 - RNA, 22 nt, synthetic construct
  source 1..22: mol_type = other RNA
gcgacgggagggtcgggacaaa

SEQ ID NO: 14307 - RNA, 22 nt, synthetic construct
  source 1..22: mol_type = other RNA
gcgacgtttgtagaatgcttgg

SEQ ID NO: 14308 - RNA, 22 nt, synthetic construct
  source 1..22: mol_type = other RNA
gcgagagagcacagcgagggcc

SEQ ID NO: 14309 - RNA, 22 nt, synthetic construct
  source 1..22: mol_type = other RNA
gcgagggccacagagggtgcag

SEQ ID NO: 14310 - RNA, 22 nt, synthetic construct
  source 1..22: mol_type = other RNA
gcgcacccccttccccactccc

SEQ ID NO: 14311 - RNA, 22 nt, synthetic construct
  source 1..22: mol_type = other RNA
gcgcagctggagtgggggacgg

SEQ ID NO: 14312 - RNA, 22 nt, synthetic construct
  source 1..22: mol_type = other RNA
gcgcatgccttttggctgtaat

SEQ ID NO: 14313 - RNA, 22 nt, synthetic construct
  source 1..22: mol_type = other RNA
gcgccagtgcactccagcgtgg

SEQ ID NO: 14314 - RNA, 22 nt, synthetic construct
  source 1..22: mol_type = other RNA
gcgccatgatagctcaaaagcc

SEQ ID NO: 14315 - RNA, 22 nt, synthetic construct
  source 1..22: mol_type = other RNA
gcgcccctccacgcgttcacaa

SEQ ID NO: 14316 - RNA, 22 nt, synthetic construct
  source 1..22: mol_type = other RNA
gcgcccgctaagttcgcatgtc

SEQ ID NO: 14317 - RNA, 22 nt, synthetic construct
  source 1..22: mol_type = other RNA
gcgccgaggttgggggagggtt

SEQ ID NO: 14318 - RNA, 22 nt, synthetic construct
  source 1..22: mol_type = other RNA
gcgccgcgcctttgggacgagc

SEQ ID NO: 14319 - RNA, 22 nt, synthetic construct
  source 1..22: mol_type = other RNA
gcgcctagacgaagtccacagc

SEQ ID NO: 14320 - RNA, 22 nt, synthetic construct
  source 1..22: mol_type = other RNA
gcgcctttgggacgagcctacc

SEQ ID NO: 14321 - RNA, 22 nt, synthetic construct
  source 1..22: mol_type = other RNA
gcgcgctacttgcccctttcgg

SEQ ID NO: 14322 - RNA, 22 nt, synthetic construct
  source 1..22: mol_type = other RNA
gcgcggcgctgaggtttgtgaa

SEQ ID NO: 14323 - RNA, 22 nt, synthetic construct
  source 1..22: mol_type = other RNA
gcgctacttgcccctttcggcg

SEQ ID NO: 14324 - RNA, 22 nt, synthetic construct
  source 1..22: mol_type = other RNA
gcgctcccgcaaaagccctggt

SEQ ID NO: 14325 - RNA, 22 nt, synthetic construct
  source 1..22: mol_type = other RNA
gcgctctgacgcttatcgacgc

SEQ ID NO: 14326 - RNA, 22 nt, synthetic construct
  source 1..22: mol_type = other RNA
gcgctgaggtttgtgaacgcgt

SEQ ID NO: 14327 - RNA, 22 nt, synthetic construct
  source 1..22: mol_type = other RNA
gcgcttggggtctgggggaggc

SEQ ID NO: 14328 - RNA, 22 nt, synthetic construct
  source 1..22: mol_type = other RNA
gcggaagagaaaccctccccca

SEQ ID NO: 14329 - RNA, 22 nt, synthetic construct
  source 1..22: mol_type = other RNA
gcggaagataactgttttcaaa

SEQ ID NO: 14330 - RNA, 22 nt, synthetic construct
  source 1..22: mol_type = other RNA
gcggcatgggccctgtggtctt

SEQ ID NO: 14331 - RNA, 22 nt, synthetic construct
  source 1..22: mol_type = other RNA
gcggcgctgaggtttgtgaacg

SEQ ID NO: 14332 - RNA, 22 nt, synthetic construct
  source 1..22: mol_type = other RNA
gcggctctgcttcccttagact

SEQ ID NO: 14333 - RNA, 22 nt, synthetic construct
  source 1..22: mol_type = other RNA
gcgggagaggaaggaccagagc

SEQ ID NO: 14334 - RNA, 22 nt, synthetic construct
  source 1..22: mol_type = other RNA
gcgggagcgcatgccttttggc

SEQ ID NO: 14335 - RNA, 22 nt, synthetic construct
  source 1..22: mol_type = other RNA
gcgggaggatctcttgagctta

SEQ ID NO: 14336 - RNA, 22 nt, synthetic construct
  source 1..22: mol_type = other RNA
gcgggaggatggcttgaggtcc

SEQ ID NO: 14337 - RNA, 22 nt, synthetic construct
  source 1..22: mol_type = other RNA
gcgggccaccaaggagaacttg

SEQ ID NO: 14338 - RNA, 22 nt, synthetic construct
  source 1..22: mol_type = other RNA
gcgggcgcctagacgaagtcca

SEQ ID NO: 14339 - RNA, 22 nt, synthetic construct
  source 1..22: mol_type = other RNA
gcggggagcaggggagaccttt

SEQ ID NO: 14340 - RNA, 22 nt, synthetic construct
  source 1..22: mol_type = other RNA
gcggtttcgaataattaactta

SEQ ID NO: 14341 - RNA, 22 nt, synthetic construct
  source 1..22: mol_type = other RNA
gcgtaagctaccacgcccaacc

SEQ ID NO: 14342 - RNA, 22 nt, synthetic construct
  source 1..22: mol_type = other RNA
gcgtcagagcgccgaggttggg

SEQ ID NO: 14343 - RNA, 22 nt, synthetic construct
  source 1..22: mol_type = other RNA
gcgtcatttaattttgaaaaca

SEQ ID NO: 14344 - RNA, 22 nt, synthetic construct
  source 1..22: mol_type = other RNA
gcgtcgataagcgtcagagcgc

SEQ ID NO: 14345 - RNA, 22 nt, synthetic construct
  source 1..22: mol_type = other RNA
gcgtcgcccgggtaagcctgtc

SEQ ID NO: 14346 - RNA, 22 nt, synthetic construct
  source 1..22: mol_type = other RNA
gcgtgagattctccagagcaaa

SEQ ID NO: 14347 - RNA, 22 nt, synthetic construct
  source 1..22: mol_type = other RNA
gcgtgctgtttcctccccacgg

SEQ ID NO: 14348 - RNA, 22 nt, synthetic construct
  source 1..22: mol_type = other RNA
gcgtggaggggcgcttggggtc

SEQ ID NO: 14349 - RNA, 22 nt, synthetic construct
  source 1..22: mol_type = other RNA
gcgttcacaaacctcagcgccg

SEQ ID NO: 14350 - RNA, 22 nt, synthetic construct
  source 1..22: mol_type = other RNA
gctaagttcgcatgtcctagca

SEQ ID NO: 14351 - RNA, 22 nt, synthetic construct
  source 1..22: mol_type = other RNA
gctaccacgcccaaccccctca

SEQ ID NO: 14352 - RNA, 22 nt, synthetic construct
  source 1..22: mol_type = other RNA
gctacttgcccctttcggcggg

SEQ ID NO: 14353 - RNA, 22 nt, synthetic construct
  source 1..22: mol_type = other RNA
gctaggacatgcgaacttagcg

SEQ ID NO: 14354 - RNA, 22 nt, synthetic construct
  source 1..22: mol_type = other RNA
gctagtccagggctggatctcg

SEQ ID NO: 14355 - RNA, 22 nt, synthetic construct
  source 1..22: mol_type = other RNA
gctatcatggcgccagtgcact

SEQ ID NO: 14356 - RNA, 22 nt, synthetic construct
  source 1..22: mol_type = other RNA
gctcaaaagcctaagctcaaga

SEQ ID NO: 14357 - RNA, 22 nt, synthetic construct
  source 1..22: mol_type = other RNA
gctcaagagatcctcccgcctc

SEQ ID NO: 14358 - RNA, 22 nt, synthetic construct
  source 1..22: mol_type = other RNA
gctcccccagcgcagctggagt

SEQ ID NO: 14359 - RNA, 22 nt, synthetic construct
  source 1..22: mol_type = other RNA
gctccccgccgaaaggggcaag

SEQ ID NO: 14360 - RNA, 22 nt, synthetic construct
  source 1..22: mol_type = other RNA
gctcccgcaaaagccctggtta

SEQ ID NO: 14361 - RNA, 22 nt, synthetic construct
  source 1..22: mol_type = other RNA
gctccggtggctgaggcgggag

SEQ ID NO: 14362 - RNA, 22 nt, synthetic construct
  source 1..22: mol_type = other RNA
gctccgtgacttcccttctcca

SEQ ID NO: 14363 - RNA, 22 nt, synthetic construct
  source 1..22: mol_type = other RNA
gctcgtcccaaaggcgcggcgc

SEQ ID NO: 14364 - RNA, 22 nt, synthetic construct
  source 1..22: mol_type = other RNA
gctcgtgcctgtggtcccagct

SEQ ID NO: 14365 - RNA, 22 nt, synthetic construct
  source 1..22: mol_type = other RNA
gctctccagtctaagggaagca

SEQ ID NO: 14366 - RNA, 22 nt, synthetic construct
  source 1..22: mol_type = other RNA
gctctctcgctccgtgacttcc

SEQ ID NO: 14367 - RNA, 22 nt, synthetic construct
  source 1..22: mol_type = other RNA
gctctgacgcttatcgacgccc

SEQ ID NO: 14368 - RNA, 22 nt, synthetic construct
  source 1..22: mol_type = other RNA
gctctgcaccctctgtggccct

SEQ ID NO: 14369 - RNA, 22 nt, synthetic construct
  source 1..22: mol_type = other RNA
gctctgcttcccttagactgga

SEQ ID NO: 14370 - RNA, 22 nt, synthetic construct
  source 1..22: mol_type = other RNA
gctctggagaatctcacgcaga

SEQ ID NO: 14371 - RNA, 22 nt, synthetic construct
  source 1..22: mol_type = other RNA
gctctggtccttcctctcccgc

SEQ ID NO: 14372 - RNA, 22 nt, synthetic construct
  source 1..22: mol_type = other RNA
gctctgttgcccacgctggagt

SEQ ID NO: 14373 - RNA, 22 nt, synthetic construct
  source 1..22: mol_type = other RNA
gctctttcgcggggcctctggc

SEQ ID NO: 14374 - RNA, 22 nt, synthetic construct
  source 1..22: mol_type = other RNA
gctctttgcctggttgtttcca

SEQ ID NO: 14375 - RNA, 22 nt, synthetic construct
  source 1..22: mol_type = other RNA
gctgaggcgggaggatctcttg

SEQ ID NO: 14376 - RNA, 22 nt, synthetic construct
  source 1..22: mol_type = other RNA
gctgaggtttgtgaacgcgtgg

SEQ ID NO: 14377 - RNA, 22 nt, synthetic construct
  source 1..22: mol_type = other RNA
gctgccatttatcccctgtgta

SEQ ID NO: 14378 - RNA, 22 nt, synthetic construct
  source 1..22: mol_type = other RNA
gctgcgctgggggagccagagg

SEQ ID NO: 14379 - RNA, 22 nt, synthetic construct
  source 1..22: mol_type = other RNA
gctgcggctctgcttcccttag

SEQ ID NO: 14380 - RNA, 22 nt, synthetic construct
  source 1..22: mol_type = other RNA
gctgctccggtggctgaggcgg

SEQ ID NO: 14381 - RNA, 22 nt, synthetic construct
  source 1..22: mol_type = other RNA
gctggagtgcactggcgccatg

SEQ ID NO: 14382 - RNA, 22 nt, synthetic construct
  source 1..22: mol_type = other RNA
gctggagtgggggacgggtagg

SEQ ID NO: 14383 - RNA, 22 nt, synthetic construct
  source 1..22: mol_type = other RNA
gctggatctcggggaagcggcg

SEQ ID NO: 14384 - RNA, 22 nt, synthetic construct
  source 1..22: mol_type = other RNA
gctggtctcaactacggacctc

SEQ ID NO: 14385 - RNA, 22 nt, synthetic construct
  source 1..22: mol_type = other RNA
gctgtgatacaaagcggtttcg

SEQ ID NO: 14386 - RNA, 22 nt, synthetic construct
  source 1..22: mol_type = other RNA
gctgtgctctctcgctccgtga

SEQ ID NO: 14387 - RNA, 22 nt, synthetic construct
  source 1..22: mol_type = other RNA
gctgtggacttcgtctaggcgc

SEQ ID NO: 14388 - RNA, 22 nt, synthetic construct
  source 1..22: mol_type = other RNA
gctgtttcctccccacggtgtg

SEQ ID NO: 14389 - RNA, 22 nt, synthetic construct
  source 1..22: mol_type = other RNA
gcttacccgggcgacgcctccc

SEQ ID NO: 14390 - RNA, 22 nt, synthetic construct
  source 1..22: mol_type = other RNA
gcttaggcttttgagctatcat

SEQ ID NO: 14391 - RNA, 22 nt, synthetic construct
  source 1..22: mol_type = other RNA
gcttatcgacgccctaaacttt

SEQ ID NO: 14392 - RNA, 22 nt, synthetic construct
  source 1..22: mol_type = other RNA
gcttccccgagatccagccctg

SEQ ID NO: 14393 - RNA, 22 nt, synthetic construct
  source 1..22: mol_type = other RNA
gcttcccttagactggagagct

SEQ ID NO: 14394 - RNA, 22 nt, synthetic construct
  source 1..22: mol_type = other RNA
gcttcctctttggctctttgcc

SEQ ID NO: 14395 - RNA, 22 nt, synthetic construct
  source 1..22: mol_type = other RNA
gcttgacttcaatctcgattgc

SEQ ID NO: 14396 - RNA, 22 nt, synthetic construct
  source 1..22: mol_type = other RNA
gcttgaggtccgtagttgagac

SEQ ID NO: 14397 - RNA, 22 nt, synthetic construct
  source 1..22: mol_type = other RNA
gcttggctgtgatacaaagcgg

SEQ ID NO: 14398 - RNA, 22 nt, synthetic construct
  source 1..22: mol_type = other RNA
gcttggggtctgggggaggcgt

SEQ ID NO: 14399 - RNA, 22 nt, synthetic construct
  source 1..22: mol_type = other RNA
gctttgcgtcatttaattttga

SEQ ID NO: 14400 - RNA, 22 nt, synthetic construct
  source 1..22: mol_type = other RNA
gctttgtatcacagccaagcat

SEQ ID NO: 14401 - RNA, 22 nt, synthetic construct
  source 1..22: mol_type = other RNA
gcttttgagctatcatggcgcc

SEQ ID NO: 14402 - RNA, 22 nt, synthetic construct
  source 1..22: mol_type = other RNA
gcttttgcgggagcgcatgcct

SEQ ID NO: 14403 - RNA, 22 nt, synthetic construct
  source 1..22: mol_type = other RNA
ggaaacaaccaggcaaagagcc

SEQ ID NO: 14404 - RNA, 22 nt, synthetic construct
  source 1..22: mol_type = other RNA
ggaaacagcacgcgacgtttgt

SEQ ID NO: 14405 - RNA, 22 nt, synthetic construct
  source 1..22: mol_type = other RNA
ggaagagaaaccctcccccaac

SEQ ID NO: 14406 - RNA, 22 nt, synthetic construct
  source 1..22: mol_type = other RNA
ggaagataactgttttcaaaat

SEQ ID NO: 14407 - RNA, 22 nt, synthetic construct
  source 1..22: mol_type = other RNA
ggaagcagagccgcagcagaca

SEQ ID NO: 14408 - RNA, 22 nt, synthetic construct
  source 1..22: mol_type = other RNA
ggaagccctctgtacgaaaaga

SEQ ID NO: 14409 - RNA, 22 nt, synthetic construct
  source 1..22: mol_type = other RNA
ggaaggaccagagcgggagggt

SEQ ID NO: 14410 - RNA, 22 nt, synthetic construct
  source 1..22: mol_type = other RNA
ggaagggggtgcgcacccggga

SEQ ID NO: 14411 - RNA, 22 nt, synthetic construct
  source 1..22: mol_type = other RNA
ggaagtcacggagcgagagagc

SEQ ID NO: 14412 - RNA, 22 nt, synthetic construct
  source 1..22: mol_type = other RNA
ggacaaagtttagggcgtcgat

SEQ ID NO: 14413 - RNA, 22 nt, synthetic construct
  source 1..22: mol_type = other RNA
ggacatgcgaacttagcgggcg

SEQ ID NO: 14414 - RNA, 22 nt, synthetic construct
  source 1..22: mol_type = other RNA
ggaccacaggcacgagccacca

SEQ ID NO: 14415 - RNA, 22 nt, synthetic construct
  source 1..22: mol_type = other RNA
ggaccagagcgggagggtagga

SEQ ID NO: 14416 - RNA, 22 nt, synthetic construct
  source 1..22: mol_type = other RNA
ggacctcaagccatcctcccgc

SEQ ID NO: 14417 - RNA, 22 nt, synthetic construct
  source 1..22: mol_type = other RNA
ggacgagcctacccgtccccca

SEQ ID NO: 14418 - RNA, 22 nt, synthetic construct
  source 1..22: mol_type = other RNA
ggacgcgcgctacttgcccctt

SEQ ID NO: 14419 - RNA, 22 nt, synthetic construct
  source 1..22: mol_type = other RNA
ggacgggtaggctcgtcccaaa

SEQ ID NO: 14420 - RNA, 22 nt, synthetic construct
  source 1..22: mol_type = other RNA
ggactagccccacggcgggcca

SEQ ID NO: 14421 - RNA, 22 nt, synthetic construct
  source 1..22: mol_type = other RNA
ggacttcgtctaggcgcccgct

SEQ ID NO: 14422 - RNA, 22 nt, synthetic construct
  source 1..22: mol_type = other RNA
ggactttatgtgctttgcgtca

SEQ ID NO: 14423 - RNA, 22 nt, synthetic construct
  source 1..22: mol_type = other RNA
ggagaacttggagaagggaagt

SEQ ID NO: 14424 - RNA, 22 nt, synthetic construct
  source 1..22: mol_type = other RNA
ggagaagggaagtcacggagcg

SEQ ID NO: 14425 - RNA, 22 nt, synthetic construct
  source 1..22: mol_type = other RNA
ggagaatctcacgcagaaggca

SEQ ID NO: 14426 - RNA, 22 nt, synthetic construct
  source 1..22: mol_type = other RNA
ggagacctttggcctacggcga

SEQ ID NO: 14427 - RNA, 22 nt, synthetic construct
  source 1..22: mol_type = other RNA
ggagagctgtggacttcgtcta

SEQ ID NO: 14428 - RNA, 22 nt, synthetic construct
  source 1..22: mol_type = other RNA
ggagaggaaggaccagagcggg

SEQ ID NO: 14429 - RNA, 22 nt, synthetic construct
  source 1..22: mol_type = other RNA
ggagcagctgggaccacaggca

SEQ ID NO: 14430 - RNA, 22 nt, synthetic construct
  source 1..22: mol_type = other RNA
ggagcaggggagacctttggcc

SEQ ID NO: 14431 - RNA, 22 nt, synthetic construct
  source 1..22: mol_type = other RNA
ggagccagaggccccgcgaaag

SEQ ID NO: 14432 - RNA, 22 nt, synthetic construct
  source 1..22: mol_type = other RNA
ggagcgagagagcacagcgagg

SEQ ID NO: 14433 - RNA, 22 nt, synthetic construct
  source 1..22: mol_type = other RNA
ggagcgcatgccttttggctgt

SEQ ID NO: 14434 - RNA, 22 nt, synthetic construct
  source 1..22: mol_type = other RNA
ggaggaaacagcacgcgacgtt

SEQ ID NO: 14435 - RNA, 22 nt, synthetic construct
  source 1..22: mol_type = other RNA
ggaggatctcttgagcttaggc

SEQ ID NO: 14436 - RNA, 22 nt, synthetic construct
  source 1..22: mol_type = other RNA
ggaggatggcttgaggtccgta

SEQ ID NO: 14437 - RNA, 22 nt, synthetic construct
  source 1..22: mol_type = other RNA
ggaggccgaggcgggaggatgg

SEQ ID NO: 14438 - RNA, 22 nt, synthetic construct
  source 1..22: mol_type = other RNA
ggaggcgtcgcccgggtaagcc

SEQ ID NO: 14439 - RNA, 22 nt, synthetic construct
  source 1..22: mol_type = other RNA
ggaggggcgcttggggtctggg

SEQ ID NO: 14440 - RNA, 22 nt, synthetic construct
  source 1..22: mol_type = other RNA
ggagggtcgggacaaagtttag

SEQ ID NO: 14441 - RNA, 22 nt, synthetic construct
  source 1..22: mol_type = other RNA
ggagggtttctcttccgctctt

SEQ ID NO: 14442 - RNA, 22 nt, synthetic construct
  source 1..22: mol_type = other RNA
ggagtgcactggcgccatgata

SEQ ID NO: 14443 - RNA, 22 nt, synthetic construct
  source 1..22: mol_type = other RNA
ggagtggggaagggggtgcgca

SEQ ID NO: 14444 - RNA, 22 nt, synthetic construct
  source 1..22: mol_type = other RNA
ggagtgggggacgggtaggctc

SEQ ID NO: 14445 - RNA, 22 nt, synthetic construct
  source 1..22: mol_type = other RNA
ggataaatggcagcaatcgaga

SEQ ID NO: 14446 - RNA, 22 nt, synthetic construct
  source 1..22: mol_type = other RNA
ggatctcggggaagcggcgggg

SEQ ID NO: 14447 - RNA, 22 nt, synthetic construct
  source 1..22: mol_type = other RNA
ggatctcttgagcttaggcttt

SEQ ID NO: 14448 - RNA, 22 nt, synthetic construct
  source 1..22: mol_type = other RNA
ggatggcttgaggtccgtagtt

SEQ ID NO: 14449 - RNA, 22 nt, synthetic construct
  source 1..22: mol_type = other RNA
ggattacaggcgtaagctacca

SEQ ID NO: 14450 - RNA, 22 nt, synthetic construct
  source 1..22: mol_type = other RNA
ggcaaagagccaaagaggaagc

SEQ ID NO: 14451 - RNA, 22 nt, synthetic construct
  source 1..22: mol_type = other RNA
ggcaagtagcgcgcgtcccggg

SEQ ID NO: 14452 - RNA, 22 nt, synthetic construct
  source 1..22: mol_type = other RNA
ggcacacagaaagatgtcaata

SEQ ID NO: 14453 - RNA, 22 nt, synthetic construct
  source 1..22: mol_type = other RNA
ggcacagtacatcttggaaaca

SEQ ID NO: 14454 - RNA, 22 nt, synthetic construct
  source 1..22: mol_type = other RNA
ggcaccgagattttaagaaact

SEQ ID NO: 14455 - RNA, 22 nt, synthetic construct
  source 1..22: mol_type = other RNA
ggcagaagataaccatagtagt

SEQ ID NO: 14456 - RNA, 22 nt, synthetic construct
  source 1..22: mol_type = other RNA
ggcagcaatcgagattgaagtc

SEQ ID NO: 14457 - RNA, 22 nt, synthetic construct
  source 1..22: mol_type = other RNA
ggcaggcgtttttcttaaaaaa

SEQ ID NO: 14458 - RNA, 22 nt, synthetic construct
  source 1..22: mol_type = other RNA
ggcatgcgctcccgcaaaagcc

SEQ ID NO: 14459 - RNA, 22 nt, synthetic construct
  source 1..22: mol_type = other RNA
ggcatgggccctgtggtctttt

SEQ ID NO: 14460 - RNA, 22 nt, synthetic construct
  source 1..22: mol_type = other RNA
ggccaaaggtctcccctgctcc

SEQ ID NO: 14461 - RNA, 22 nt, synthetic construct
  source 1..22: mol_type = other RNA
ggccaacatggtgaagcctggt

SEQ ID NO: 14462 - RNA, 22 nt, synthetic construct
  source 1..22: mol_type = other RNA
ggccacaccgtggggaggaaac

SEQ ID NO: 14463 - RNA, 22 nt, synthetic construct
  source 1..22: mol_type = other RNA
ggccacagagggtgcagagcgg

SEQ ID NO: 14464 - RNA, 22 nt, synthetic construct
  source 1..22: mol_type = other RNA
ggccaccaaggagaacttggag

SEQ ID NO: 14465 - RNA, 22 nt, synthetic construct
  source 1..22: mol_type = other RNA
ggccaggctggtctcaactacg

SEQ ID NO: 14466 - RNA, 22 nt, synthetic construct
  source 1..22: mol_type = other RNA
ggcccatgccgcccagtttgct

SEQ ID NO: 14467 - RNA, 22 nt, synthetic construct
  source 1..22: mol_type = other RNA
ggccccacatagacccagaggt

SEQ ID NO: 14468 - RNA, 22 nt, synthetic construct
  source 1..22: mol_type = other RNA
ggccccgcgaaagagcggaaga

SEQ ID NO: 14469 - RNA, 22 nt, synthetic construct
  source 1..22: mol_type = other RNA
ggcccgccgtggggctagtcca

SEQ ID NO: 14470 - RNA, 22 nt, synthetic construct
  source 1..22: mol_type = other RNA
ggccctcgctgtgctctctcgc

SEQ ID NO: 14471 - RNA, 22 nt, synthetic construct
  source 1..22: mol_type = other RNA
ggccctgtggtcttttcgtaca

SEQ ID NO: 14472 - RNA, 22 nt, synthetic construct
  source 1..22: mol_type = other RNA
ggccgaggcgggaggatggctt

SEQ ID NO: 14473 - RNA, 22 nt, synthetic construct
  source 1..22: mol_type = other RNA
ggcctacggcgacgggagggtc

SEQ ID NO: 14474 - RNA, 22 nt, synthetic construct
  source 1..22: mol_type = other RNA
ggcctctggctcccccagcgca

SEQ ID NO: 14475 - RNA, 22 nt, synthetic construct
  source 1..22: mol_type = other RNA
ggcctgggagtggggaaggggg

SEQ ID NO: 14476 - RNA, 22 nt, synthetic construct
  source 1..22: mol_type = other RNA
ggcgacgggagggtcgggacaa

SEQ ID NO: 14477 - RNA, 22 nt, synthetic construct
  source 1..22: mol_type = other RNA
ggcgccagtgcactccagcgtg

SEQ ID NO: 14478 - RNA, 22 nt, synthetic construct
  source 1..22: mol_type = other RNA
ggcgccatgatagctcaaaagc

SEQ ID NO: 14479 - RNA, 22 nt, synthetic construct
  source 1..22: mol_type = other RNA
ggcgcccgctaagttcgcatgt

SEQ ID NO: 14480 - RNA, 22 nt, synthetic construct
  source 1..22: mol_type = other RNA
ggcgcctagacgaagtccacag

SEQ ID NO: 14481 - RNA, 22 nt, synthetic construct
  source 1..22: mol_type = other RNA
ggcgcggcgctgaggtttgtga

SEQ ID NO: 14482 - RNA, 22 nt, synthetic construct
  source 1..22: mol_type = other RNA
ggcgctctgacgcttatcgacg

SEQ ID NO: 14483 - RNA, 22 nt, synthetic construct
  source 1..22: mol_type = other RNA
ggcgctgaggtttgtgaacgcg

SEQ ID NO: 14484 - RNA, 22 nt, synthetic construct
  source 1..22: mol_type = other RNA
ggcgcttggggtctgggggagg

SEQ ID NO: 14485 - RNA, 22 nt, synthetic construct
  source 1..22: mol_type = other RNA
ggcggaagataactgttttcaa

SEQ ID NO: 14486 - RNA, 22 nt, synthetic construct
  source 1..22: mol_type = other RNA
ggcggcatgggccctgtggtct

SEQ ID NO: 14487 - RNA, 22 nt, synthetic construct
  source 1..22: mol_type = other RNA
ggcgggaggatctcttgagctt

SEQ ID NO: 14488 - RNA, 22 nt, synthetic construct
  source 1..22: mol_type = other RNA
ggcgggaggatggcttgaggtc

SEQ ID NO: 14489 - RNA, 22 nt, synthetic construct
  source 1..22: mol_type = other RNA
ggcgggccaccaaggagaactt

SEQ ID NO: 14490 - RNA, 22 nt, synthetic construct
  source 1..22: mol_type = other RNA
ggcggggagcaggggagacctt

SEQ ID NO: 14491 - RNA, 22 nt, synthetic construct
  source 1..22: mol_type = other RNA
ggcgtaagctaccacgcccaac

SEQ ID NO: 14492 - RNA, 22 nt, synthetic construct
  source 1..22: mol_type = other RNA
ggcgtcgataagcgtcagagcg

SEQ ID NO: 14493 - RNA, 22 nt, synthetic construct
  source 1..22: mol_type = other RNA
ggcgtcgcccgggtaagcctgt

SEQ ID NO: 14494 - RNA, 22 nt, synthetic construct
  source 1..22: mol_type = other RNA
ggctagtccagggctggatctc

SEQ ID NO: 14495 - RNA, 22 nt, synthetic construct
  source 1..22: mol_type = other RNA
ggctcccccagcgcagctggag

SEQ ID NO: 14496 - RNA, 22 nt, synthetic construct
  source 1..22: mol_type = other RNA
ggctcgtcccaaaggcgcggcg

SEQ ID NO: 14497 - RNA, 22 nt, synthetic construct
  source 1..22: mol_type = other RNA
ggctcgtgcctgtggtcccagc

SEQ ID NO: 14498 - RNA, 22 nt, synthetic construct
  source 1..22: mol_type = other RNA
ggctctgcttcccttagactgg

SEQ ID NO: 14499 - RNA, 22 nt, synthetic construct
  source 1..22: mol_type = other RNA
ggctctttgcctggttgtttcc

SEQ ID NO: 14500 - RNA, 22 nt, synthetic construct
  source 1..22: mol_type = other RNA
ggctgaggcgggaggatctctt

SEQ ID NO: 14501 - RNA, 22 nt, synthetic construct
  source 1..22: mol_type = other RNA
ggctggatctcggggaagcggc

SEQ ID NO: 14502 - RNA, 22 nt, synthetic construct
  source 1..22: mol_type = other RNA
ggctggtctcaactacggacct

SEQ ID NO: 14503 - RNA, 22 nt, synthetic construct
  source 1..22: mol_type = other RNA
ggctgtaattcgtgcatttttt

SEQ ID NO: 14504 - RNA, 22 nt, synthetic construct
  source 1..22: mol_type = other RNA
ggctgtgatacaaagcggtttc

SEQ ID NO: 14505 - RNA, 22 nt, synthetic construct
  source 1..22: mol_type = other RNA
ggcttacccgggcgacgcctcc

SEQ ID NO: 14506 - RNA, 22 nt, synthetic construct
  source 1..22: mol_type = other RNA
ggcttcctctttggctctttgc

SEQ ID NO: 14507 - RNA, 22 nt, synthetic construct
  source 1..22: mol_type = other RNA
ggcttgacttcaatctcgattg

SEQ ID NO: 14508 - RNA, 22 nt, synthetic construct
  source 1..22: mol_type = other RNA
ggcttgaggtccgtagttgaga

SEQ ID NO: 14509 - RNA, 22 nt, synthetic construct
  source 1..22: mol_type = other RNA
ggcttttgagctatcatggcgc

SEQ ID NO: 14510 - RNA, 22 nt, synthetic construct
  source 1..22: mol_type = other RNA
ggcttttgcgggagcgcatgcc

SEQ ID NO: 14511 - RNA, 22 nt, synthetic construct
  source 1..22: mol_type = other RNA
gggaagcagagccgcagcagac

SEQ ID NO: 14512 - RNA, 22 nt, synthetic construct
  source 1..22: mol_type = other RNA
gggaagtcacggagcgagagag

SEQ ID NO: 14513 - RNA, 22 nt, synthetic construct
  source 1..22: mol_type = other RNA
gggacaaagtttagggcgtcga

SEQ ID NO: 14514 - RNA, 22 nt, synthetic construct
  source 1..22: mol_type = other RNA
gggaccacaggcacgagccacc

SEQ ID NO: 14515 - RNA, 22 nt, synthetic construct
  source 1..22: mol_type = other RNA
gggacgagcctacccgtccccc

SEQ ID NO: 14516 - RNA, 22 nt, synthetic construct
  source 1..22: mol_type = other RNA
gggacgcgcgctacttgcccct

SEQ ID NO: 14517 - RNA, 22 nt, synthetic construct
  source 1..22: mol_type = other RNA
gggacgggtaggctcgtcccaa

SEQ ID NO: 14518 - RNA, 22 nt, synthetic construct
  source 1..22: mol_type = other RNA
gggagacctttggcctacggcg

SEQ ID NO: 14519 - RNA, 22 nt, synthetic construct
  source 1..22: mol_type = other RNA
gggagaggaaggaccagagcgg

SEQ ID NO: 14520 - RNA, 22 nt, synthetic construct
  source 1..22: mol_type = other RNA
gggagcaggggagacctttggc

SEQ ID NO: 14521 - RNA, 22 nt, synthetic construct
  source 1..22: mol_type = other RNA
gggagccagaggccccgcgaaa

SEQ ID NO: 14522 - RNA, 22 nt, synthetic construct
  source 1..22: mol_type = other RNA
gggagcgcatgccttttggctg

SEQ ID NO: 14523 - RNA, 22 nt, synthetic construct
  source 1..22: mol_type = other RNA
gggaggaaacagcacgcgacgt

SEQ ID NO: 14524 - RNA, 22 nt, synthetic construct
  source 1..22: mol_type = other RNA
gggaggatctcttgagcttagg

SEQ ID NO: 14525 - RNA, 22 nt, synthetic construct
  source 1..22: mol_type = other RNA
gggaggatggcttgaggtccgt

SEQ ID NO: 14526 - RNA, 22 nt, synthetic construct
  source 1..22: mol_type = other RNA
gggaggcgtcgcccgggtaagc

SEQ ID NO: 14527 - RNA, 22 nt, synthetic construct
  source 1..22: mol_type = other RNA
gggagggtcgggacaaagttta

SEQ ID NO: 14528 - RNA, 22 nt, synthetic construct
  source 1..22: mol_type = other RNA
gggagggtttctcttccgctct

SEQ ID NO: 14529 - RNA, 22 nt, synthetic construct
  source 1..22: mol_type = other RNA
gggagtggggaagggggtgcgc

SEQ ID NO: 14530 - RNA, 22 nt, synthetic construct
  source 1..22: mol_type = other RNA
gggataaatggcagcaatcgag

SEQ ID NO: 14531 - RNA, 22 nt, synthetic construct
  source 1..22: mol_type = other RNA
gggattacaggcgtaagctacc

SEQ ID NO: 14532 - RNA, 22 nt, synthetic construct
  source 1..22: mol_type = other RNA
gggcaagtagcgcgcgtcccgg

SEQ ID NO: 14533 - RNA, 22 nt, synthetic construct
  source 1..22: mol_type = other RNA
gggccacaccgtggggaggaaa

SEQ ID NO: 14534 - RNA, 22 nt, synthetic construct
  source 1..22: mol_type = other RNA
gggccacagagggtgcagagcg

SEQ ID NO: 14535 - RNA, 22 nt, synthetic construct
  source 1..22: mol_type = other RNA
gggccaccaaggagaacttgga

SEQ ID NO: 14536 - RNA, 22 nt, synthetic construct
  source 1..22: mol_type = other RNA
gggcccatgccgcccagtttgc

SEQ ID NO: 14537 - RNA, 22 nt, synthetic construct
  source 1..22: mol_type = other RNA
gggccctgtggtcttttcgtac

SEQ ID NO: 14538 - RNA, 22 nt, synthetic construct
  source 1..22: mol_type = other RNA
gggcgcctagacgaagtccaca

SEQ ID NO: 14539 - RNA, 22 nt, synthetic construct
  source 1..22: mol_type = other RNA
gggcgcttggggtctgggggag

SEQ ID NO: 14540 - RNA, 22 nt, synthetic construct
  source 1..22: mol_type = other RNA
gggcggcatgggccctgtggtc

SEQ ID NO: 14541 - RNA, 22 nt, synthetic construct
  source 1..22: mol_type = other RNA
gggcgtcgataagcgtcagagc

SEQ ID NO: 14542 - RNA, 22 nt, synthetic construct
  source 1..22: mol_type = other RNA
gggctagtccagggctggatct

SEQ ID NO: 14543 - RNA, 22 nt, synthetic construct
  source 1..22: mol_type = other RNA
gggctggatctcggggaagcgg

SEQ ID NO: 14544 - RNA, 22 nt, synthetic construct
  source 1..22: mol_type = other RNA
gggcttcctctttggctctttg

SEQ ID NO: 14545 - RNA, 22 nt, synthetic construct
  source 1..22: mol_type = other RNA
gggcttttgcgggagcgcatgc

SEQ ID NO: 14546 - RNA, 22 nt, synthetic construct
  source 1..22: mol_type = other RNA
ggggacgggtaggctcgtccca

SEQ ID NO: 14547 - RNA, 22 nt, synthetic construct
  source 1..22: mol_type = other RNA
ggggagacctttggcctacggc

SEQ ID NO: 14548 - RNA, 22 nt, synthetic construct
  source 1..22: mol_type = other RNA
ggggagcaggggagacctttgg

SEQ ID NO: 14549 - RNA, 22 nt, synthetic construct
  source 1..22: mol_type = other RNA
ggggagccagaggccccgcgaa

SEQ ID NO: 14550 - RNA, 22 nt, synthetic construct
  source 1..22: mol_type = other RNA
ggggaggaaacagcacgcgacg

SEQ ID NO: 14551 - RNA, 22 nt, synthetic construct
  source 1..22: mol_type = other RNA
ggggaggcgtcgcccgggtaag

SEQ ID NO: 14552 - RNA, 22 nt, synthetic construct
  source 1..22: mol_type = other RNA
ggggagggtttctcttccgctc

SEQ ID NO: 14553 - RNA, 22 nt, synthetic construct
  source 1..22: mol_type = other RNA
ggggataaatggcagcaatcga

SEQ ID NO: 14554 - RNA, 22 nt, synthetic construct
  source 1..22: mol_type = other RNA
ggggcaagtagcgcgcgtcccg

SEQ ID NO: 14555 - RNA, 22 nt, synthetic construct
  source 1..22: mol_type = other RNA
ggggccacaccgtggggaggaa

SEQ ID NO: 14556 - RNA, 22 nt, synthetic construct
  source 1..22: mol_type = other RNA
ggggcgcttggggtctggggga

SEQ ID NO: 14557 - RNA, 22 nt, synthetic construct
  source 1..22: mol_type = other RNA
ggggctagtccagggctggatc

SEQ ID NO: 14558 - RNA, 22 nt, synthetic construct
  source 1..22: mol_type = other RNA
gggggacgggtaggctcgtccc

SEQ ID NO: 14559 - RNA, 22 nt, synthetic construct
  source 1..22: mol_type = other RNA
gggggaggcgtcgcccgggtaa

SEQ ID NO: 14560 - RNA, 22 nt, synthetic construct
  source 1..22: mol_type = other RNA
gggggagggtttctcttccgct

SEQ ID NO: 14561 - RNA, 22 nt, synthetic construct
  source 1..22: mol_type = other RNA
gggggttgggcgtggtagctta

SEQ ID NO: 14562 - RNA, 22 nt, synthetic construct
  source 1..22: mol_type = other RNA
ggggtggcctgggagtggggaa

SEQ ID NO: 14563 - RNA, 22 nt, synthetic construct
  source 1..22: mol_type = other RNA
ggggttgggcgtggtagcttac

SEQ ID NO: 14564 - RNA, 22 nt, synthetic construct
  source 1..22: mol_type = other RNA
gggtaagcctgtctgctgcggc

SEQ ID NO: 14565 - RNA, 22 nt, synthetic construct
  source 1..22: mol_type = other RNA
gggtaggctcgtcccaaaggcg

SEQ ID NO: 14566 - RNA, 22 nt, synthetic construct
  source 1..22: mol_type = other RNA
gggtcgggacaaagtttagggc

SEQ ID NO: 14567 - RNA, 22 nt, synthetic construct
  source 1..22: mol_type = other RNA
gggtctatgtggggccacaccg

SEQ ID NO: 14568 - RNA, 22 nt, synthetic construct
  source 1..22: mol_type = other RNA
gggtgcagagcgggagaggaag

SEQ ID NO: 14569 - RNA, 22 nt, synthetic construct
  source 1..22: mol_type = other RNA
gggtgcgcacccccttccccac

SEQ ID NO: 14570 - RNA, 22 nt, synthetic construct
  source 1..22: mol_type = other RNA
gggtggcctgggagtggggaag

SEQ ID NO: 14571 - RNA, 22 nt, synthetic construct
  source 1..22: mol_type = other RNA
gggttgggcgtggtagcttacg

SEQ ID NO: 14572 - RNA, 22 nt, synthetic construct
  source 1..22: mol_type = other RNA
gggtttctcttccgctctttcg

SEQ ID NO: 14573 - RNA, 22 nt, synthetic construct
  source 1..22: mol_type = other RNA
ggtaagcctgtctgctgcggct

SEQ ID NO: 14574 - RNA, 22 nt, synthetic construct
  source 1..22: mol_type = other RNA
ggtaggctcgtcccaaaggcgc

SEQ ID NO: 14575 - RNA, 22 nt, synthetic construct
  source 1..22: mol_type = other RNA
ggtcccagctgctccggtggct

SEQ ID NO: 14576 - RNA, 22 nt, synthetic construct
  source 1..22: mol_type = other RNA
ggtccgtagttgagaccagcct

SEQ ID NO: 14577 - RNA, 22 nt, synthetic construct
  source 1..22: mol_type = other RNA
ggtccttcctctcccgctctgc

SEQ ID NO: 14578 - RNA, 22 nt, synthetic construct
  source 1..22: mol_type = other RNA
ggtcgggacaaagtttagggcg

SEQ ID NO: 14579 - RNA, 22 nt, synthetic construct
  source 1..22: mol_type = other RNA
ggtctatgtggggccacaccgt

SEQ ID NO: 14580 - RNA, 22 nt, synthetic construct
  source 1..22: mol_type = other RNA
ggtctcaactacggacctcaag

SEQ ID NO: 14581 - RNA, 22 nt, synthetic construct
  source 1..22: mol_type = other RNA
ggtctcccctgctccccgccga

SEQ ID NO: 14582 - RNA, 22 nt, synthetic construct
  source 1..22: mol_type = other RNA
ggtctctacaaaaaataataac

SEQ ID NO: 14583 - RNA, 22 nt, synthetic construct
  source 1..22: mol_type = other RNA
ggtcttttcgtacagagggctt

SEQ ID NO: 14584 - RNA, 22 nt, synthetic construct
  source 1..22: mol_type = other RNA
ggtgaagcctggtctctacaaa

SEQ ID NO: 14585 - RNA, 22 nt, synthetic construct
  source 1..22: mol_type = other RNA
ggtgcagagcgggagaggaagg

SEQ ID NO: 14586 - RNA, 22 nt, synthetic construct
  source 1..22: mol_type = other RNA
ggtgccttagtttcttcatctg

SEQ ID NO: 14587 - RNA, 22 nt, synthetic construct
  source 1..22: mol_type = other RNA
ggtgcgcacccccttccccact

SEQ ID NO: 14588 - RNA, 22 nt, synthetic construct
  source 1..22: mol_type = other RNA
ggtgctaggacatgcgaactta

SEQ ID NO: 14589 - RNA, 22 nt, synthetic construct
  source 1..22: mol_type = other RNA
ggtggcccgccgtggggctagt

SEQ ID NO: 14590 - RNA, 22 nt, synthetic construct
  source 1..22: mol_type = other RNA
ggtggcctgggagtggggaagg

SEQ ID NO: 14591 - RNA, 22 nt, synthetic construct
  source 1..22: mol_type = other RNA
ggtggctcgtgcctgtggtccc

SEQ ID NO: 14592 - RNA, 22 nt, synthetic construct
  source 1..22: mol_type = other RNA
ggtgtggccccacatagaccca

SEQ ID NO: 14593 - RNA, 22 nt, synthetic construct
  source 1..22: mol_type = other RNA
ggttaggcttgacttcaatctc

SEQ ID NO: 14594 - RNA, 22 nt, synthetic construct
  source 1..22: mol_type = other RNA
ggttatcttctgcctctcacag

SEQ ID NO: 14595 - RNA, 22 nt, synthetic construct
  source 1..22: mol_type = other RNA
ggttgggcgtggtagcttacgc

SEQ ID NO: 14596 - RNA, 22 nt, synthetic construct
  source 1..22: mol_type = other RNA
ggttgggggagggtttctcttc

SEQ ID NO: 14597 - RNA, 22 nt, synthetic construct
  source 1..22: mol_type = other RNA
ggttgtttccaagatgtactgt

SEQ ID NO: 14598 - RNA, 22 nt, synthetic construct
  source 1..22: mol_type = other RNA
ggtttctcttccgctctttcgc

SEQ ID NO: 14599 - RNA, 22 nt, synthetic construct
  source 1..22: mol_type = other RNA
ggtttgtgaacgcgtggagggg

SEQ ID NO: 14600 - RNA, 22 nt, synthetic construct
  source 1..22: mol_type = other RNA
ggttttgaaaacatgagggggt

SEQ ID NO: 14601 - RNA, 22 nt, synthetic construct
  source 1..22: mol_type = other RNA
gtaagaggcacagtacatcttg

SEQ ID NO: 14602 - RNA, 22 nt, synthetic construct
  source 1..22: mol_type = other RNA
gtaagcctgtctgctgcggctc

SEQ ID NO: 14603 - RNA, 22 nt, synthetic construct
  source 1..22: mol_type = other RNA
gtaagctaccacgcccaacccc

SEQ ID NO: 14604 - RNA, 22 nt, synthetic construct
  source 1..22: mol_type = other RNA
gtacagagggcttcctctttgg

SEQ ID NO: 14605 - RNA, 22 nt, synthetic construct
  source 1..22: mol_type = other RNA
gtacatcttggaaacaaccagg

SEQ ID NO: 14606 - RNA, 22 nt, synthetic construct
  source 1..22: mol_type = other RNA
gtacgaaaagaccacagggccc

SEQ ID NO: 14607 - RNA, 22 nt, synthetic construct
  source 1..22: mol_type = other RNA
gtactgtgcctcttactttcgg

SEQ ID NO: 14608 - RNA, 22 nt, synthetic construct
  source 1..22: mol_type = other RNA
gtagaatgcttggctgtgatac

SEQ ID NO: 14609 - RNA, 22 nt, synthetic construct
  source 1..22: mol_type = other RNA
gtaggccaaaggtctcccctgc

SEQ ID NO: 14610 - RNA, 22 nt, synthetic construct
  source 1..22: mol_type = other RNA
gtaggctcgtcccaaaggcgcg

SEQ ID NO: 14611 - RNA, 22 nt, synthetic construct
  source 1..22: mol_type = other RNA
gtagttatctatggcggaagat

SEQ ID NO: 14612 - RNA, 22 nt, synthetic construct
  source 1..22: mol_type = other RNA
gtatcacagccaagcattctac

SEQ ID NO: 14613 - RNA, 22 nt, synthetic construct
  source 1..22: mol_type = other RNA
gtcaagcctaaccagggctttt

SEQ ID NO: 14614 - RNA, 22 nt, synthetic construct
  source 1..22: mol_type = other RNA
gtcaataacgggtagttcttat

SEQ ID NO: 14615 - RNA, 22 nt, synthetic construct
  source 1..22: mol_type = other RNA
gtcacggagcgagagagcacag

SEQ ID NO: 14616 - RNA, 22 nt, synthetic construct
  source 1..22: mol_type = other RNA
gtcagagcgccgaggttggggg

SEQ ID NO: 14617 - RNA, 22 nt, synthetic construct
  source 1..22: mol_type = other RNA
gtccacagctctccagtctaag

SEQ ID NO: 14618 - RNA, 22 nt, synthetic construct
  source 1..22: mol_type = other RNA
gtccagggctggatctcgggga

SEQ ID NO: 14619 - RNA, 22 nt, synthetic construct
  source 1..22: mol_type = other RNA
gtcccaaaggcgcggcgctgag

SEQ ID NO: 14620 - RNA, 22 nt, synthetic construct
  source 1..22: mol_type = other RNA
gtcccagctgctccggtggctg

SEQ ID NO: 14621 - RNA, 22 nt, synthetic construct
  source 1..22: mol_type = other RNA
gtcccccactccagctgcgctg

SEQ ID NO: 14622 - RNA, 22 nt, synthetic construct
  source 1..22: mol_type = other RNA
gtcccgaccctcccgtcgccgt

SEQ ID NO: 14623 - RNA, 22 nt, synthetic construct
  source 1..22: mol_type = other RNA
gtcccgggtgcgcacccccttc

SEQ ID NO: 14624 - RNA, 22 nt, synthetic construct
  source 1..22: mol_type = other RNA
gtccgtagttgagaccagcctg

SEQ ID NO: 14625 - RNA, 22 nt, synthetic construct
  source 1..22: mol_type = other RNA
gtcctagcacctctgggtctat

SEQ ID NO: 14626 - RNA, 22 nt, synthetic construct
  source 1..22: mol_type = other RNA
gtccttcctctcccgctctgca

SEQ ID NO: 14627 - RNA, 22 nt, synthetic construct
  source 1..22: mol_type = other RNA
gtccttggcacacagaaagatg

SEQ ID NO: 14628 - RNA, 22 nt, synthetic construct
  source 1..22: mol_type = other RNA
gtcgataagcgtcagagcgccg

SEQ ID NO: 14629 - RNA, 22 nt, synthetic construct
  source 1..22: mol_type = other RNA
gtcgcccgggtaagcctgtctg

SEQ ID NO: 14630 - RNA, 22 nt, synthetic construct
  source 1..22: mol_type = other RNA
gtcgccgtaggccaaaggtctc

SEQ ID NO: 14631 - RNA, 22 nt, synthetic construct
  source 1..22: mol_type = other RNA
gtcgcgtgctgtttcctcccca

SEQ ID NO: 14632 - RNA, 22 nt, synthetic construct
  source 1..22: mol_type = other RNA
gtcgggacaaagtttagggcgt

SEQ ID NO: 14633 - RNA, 22 nt, synthetic construct
  source 1..22: mol_type = other RNA
gtctaagggaagcagagccgca

SEQ ID NO: 14634 - RNA, 22 nt, synthetic construct
  source 1..22: mol_type = other RNA
gtctaggcgcccgctaagttcg

SEQ ID NO: 14635 - RNA, 22 nt, synthetic construct
  source 1..22: mol_type = other RNA
gtctatgtggggccacaccgtg

SEQ ID NO: 14636 - RNA, 22 nt, synthetic construct
  source 1..22: mol_type = other RNA
gtctcaactacggacctcaagc

SEQ ID NO: 14637 - RNA, 22 nt, synthetic construct
  source 1..22: mol_type = other RNA
gtctcccctgctccccgccgaa

SEQ ID NO: 14638 - RNA, 22 nt, synthetic construct
  source 1..22: mol_type = other RNA
gtctctcctaccctcccgctct

SEQ ID NO: 14639 - RNA, 22 nt, synthetic construct
  source 1..22: mol_type = other RNA
gtctgctgcggctctgcttccc

SEQ ID NO: 14640 - RNA, 22 nt, synthetic construct
  source 1..22: mol_type = other RNA
gtcttttcgtacagagggcttc

SEQ ID NO: 14641 - RNA, 22 nt, synthetic construct
  source 1..22: mol_type = other RNA
gtgaacgcgtggaggggcgctt

SEQ ID NO: 14642 - RNA, 22 nt, synthetic construct
  source 1..22: mol_type = other RNA
gtgaagcctggtctctacaaaa

SEQ ID NO: 14643 - RNA, 22 nt, synthetic construct
  source 1..22: mol_type = other RNA
gtgacatgtgatgggaacaaat

SEQ ID NO: 14644 - RNA, 22 nt, synthetic construct
  source 1..22: mol_type = other RNA
gtgacttcccttctccaagttc

SEQ ID NO: 14645 - RNA, 22 nt, synthetic construct
  source 1..22: mol_type = other RNA
gtgagaggcagaagataaccat

SEQ ID NO: 14646 - RNA, 22 nt, synthetic construct
  source 1..22: mol_type = other RNA
gtgagattctccagagcaaact

SEQ ID NO: 14647 - RNA, 22 nt, synthetic construct
  source 1..22: mol_type = other RNA
gtgagtctctcctaccctcccg

SEQ ID NO: 14648 - RNA, 22 nt, synthetic construct
  source 1..22: mol_type = other RNA
gtgatacaaagcggtttcgaat

SEQ ID NO: 14649 - RNA, 22 nt, synthetic construct
  source 1..22: mol_type = other RNA
gtgatgggaacaaataagttaa

SEQ ID NO: 14650 - RNA, 22 nt, synthetic construct
  source 1..22: mol_type = other RNA
gtgcactccagcgtgggcaaca

SEQ ID NO: 14651 - RNA, 22 nt, synthetic construct
  source 1..22: mol_type = other RNA
gtgcactggcgccatgatagct

SEQ ID NO: 14652 - RNA, 22 nt, synthetic construct
  source 1..22: mol_type = other RNA
gtgcagagcgggagaggaagga

SEQ ID NO: 14653 - RNA, 22 nt, synthetic construct
  source 1..22: mol_type = other RNA
gtgccaaggactttatgtgctt

SEQ ID NO: 14654 - RNA, 22 nt, synthetic construct
  source 1..22: mol_type = other RNA
gtgcctcttactttcggttttg

SEQ ID NO: 14655 - RNA, 22 nt, synthetic construct
  source 1..22: mol_type = other RNA
gtgcctgtggtcccagctgctc

SEQ ID NO: 14656 - RNA, 22 nt, synthetic construct
  source 1..22: mol_type = other RNA
gtgccttagtttcttcatctgt

SEQ ID NO: 14657 - RNA, 22 nt, synthetic construct
  source 1..22: mol_type = other RNA
gtgcgcacccccttccccactc

SEQ ID NO: 14658 - RNA, 22 nt, synthetic construct
  source 1..22: mol_type = other RNA
gtgctaggacatgcgaacttag

SEQ ID NO: 14659 - RNA, 22 nt, synthetic construct
  source 1..22: mol_type = other RNA
gtgctctctcgctccgtgactt

SEQ ID NO: 14660 - RNA, 22 nt, synthetic construct
  source 1..22: mol_type = other RNA
gtgctgtttcctccccacggtg

SEQ ID NO: 14661 - RNA, 22 nt, synthetic construct
  source 1..22: mol_type = other RNA
gtgctttgcgtcatttaatttt

SEQ ID NO: 14662 - RNA, 22 nt, synthetic construct
  source 1..22: mol_type = other RNA
gtggacttcgtctaggcgcccg

SEQ ID NO: 14663 - RNA, 22 nt, synthetic construct
  source 1..22: mol_type = other RNA
gtggaggggcgcttggggtctg

SEQ ID NO: 14664 - RNA, 22 nt, synthetic construct
  source 1..22: mol_type = other RNA
gtggccccacatagacccagag

SEQ ID NO: 14665 - RNA, 22 nt, synthetic construct
  source 1..22: mol_type = other RNA
gtggcccgccgtggggctagtc

SEQ ID NO: 14666 - RNA, 22 nt, synthetic construct
  source 1..22: mol_type = other RNA
gtggccctcgctgtgctctctc

SEQ ID NO: 14667 - RNA, 22 nt, synthetic construct
  source 1..22: mol_type = other RNA
gtggcctgggagtggggaaggg

SEQ ID NO: 14668 - RNA, 22 nt, synthetic construct
  source 1..22: mol_type = other RNA
gtggctcgtgcctgtggtccca

SEQ ID NO: 14669 - RNA, 22 nt, synthetic construct
  source 1..22: mol_type = other RNA
gtggctgaggcgggaggatctc

SEQ ID NO: 14670 - RNA, 22 nt, synthetic construct
  source 1..22: mol_type = other RNA
gtgggcaacagagcgagaccct

SEQ ID NO: 14671 - RNA, 22 nt, synthetic construct
  source 1..22: mol_type = other RNA
gtggggaagggggtgcgcaccc

SEQ ID NO: 14672 - RNA, 22 nt, synthetic construct
  source 1..22: mol_type = other RNA
gtggggaggaaacagcacgcga

SEQ ID NO: 14673 - RNA, 22 nt, synthetic construct
  source 1..22: mol_type = other RNA
gtggggccacaccgtggggagg

SEQ ID NO: 14674 - RNA, 22 nt, synthetic construct
  source 1..22: mol_type = other RNA
gtggggctagtccagggctgga

SEQ ID NO: 14675 - RNA, 22 nt, synthetic construct
  source 1..22: mol_type = other RNA
gtgggggacgggtaggctcgtc

SEQ ID NO: 14676 - RNA, 22 nt, synthetic construct
  source 1..22: mol_type = other RNA
gtggtcccagctgctccggtgg

SEQ ID NO: 14677 - RNA, 22 nt, synthetic construct
  source 1..22: mol_type = other RNA
gtggtcttttcgtacagagggc

SEQ ID NO: 14678 - RNA, 22 nt, synthetic construct
  source 1..22: mol_type = other RNA
gtggtggctcgtgcctgtggtc

SEQ ID NO: 14679 - RNA, 22 nt, synthetic construct
  source 1..22: mol_type = other RNA
gtgtgccaaggactttatgtgc

SEQ ID NO: 14680 - RNA, 22 nt, synthetic construct
  source 1..22: mol_type = other RNA
gtgtggccccacatagacccag

SEQ ID NO: 14681 - RNA, 22 nt, synthetic construct
  source 1..22: mol_type = other RNA
gttaattattcgaaaccgcttt

SEQ ID NO: 14682 - RNA, 22 nt, synthetic construct
  source 1..22: mol_type = other RNA
gttaggcttgacttcaatctcg

SEQ ID NO: 14683 - RNA, 22 nt, synthetic construct
  source 1..22: mol_type = other RNA
gttatctatggcggaagataac

SEQ ID NO: 14684 - RNA, 22 nt, synthetic construct
  source 1..22: mol_type = other RNA
gttatcttccgccatagataac

SEQ ID NO: 14685 - RNA, 22 nt, synthetic construct
  source 1..22: mol_type = other RNA
gttatcttctgcctctcacaga

SEQ ID NO: 14686 - RNA, 22 nt, synthetic construct
  source 1..22: mol_type = other RNA
gttattattttttgtagagacc

SEQ ID NO: 14687 - RNA, 22 nt, synthetic construct
  source 1..22: mol_type = other RNA
gttattgacatctttctgtgtg

SEQ ID NO: 14688 - RNA, 22 nt, synthetic construct
  source 1..22: mol_type = other RNA
gttcacaaacctcagcgccgcg

SEQ ID NO: 14689 - RNA, 22 nt, synthetic construct
  source 1..22: mol_type = other RNA
gttcccatcacatgtcactttt

SEQ ID NO: 14690 - RNA, 22 nt, synthetic construct
  source 1..22: mol_type = other RNA
gttcgcatgtcctagcacctct

SEQ ID NO: 14691 - RNA, 22 nt, synthetic construct
  source 1..22: mol_type = other RNA
gttctccttggtggcccgccgt

SEQ ID NO: 14692 - RNA, 22 nt, synthetic construct
  source 1..22: mol_type = other RNA
gttgcccacgctggagtgcact

SEQ ID NO: 14693 - RNA, 22 nt, synthetic construct
  source 1..22: mol_type = other RNA
gttggccaggctggtctcaact

SEQ ID NO: 14694 - RNA, 22 nt, synthetic construct
  source 1..22: mol_type = other RNA
gttgggcgtggtagcttacgcc

SEQ ID NO: 14695 - RNA, 22 nt, synthetic construct
  source 1..22: mol_type = other RNA
gttgggggagggtttctcttcc

SEQ ID NO: 14696 - RNA, 22 nt, synthetic construct
  source 1..22: mol_type = other RNA
gttgtttccaagatgtactgtg

SEQ ID NO: 14697 - RNA, 22 nt, synthetic construct
  source 1..22: mol_type = other RNA
gtttagggcgtcgataagcgtc

SEQ ID NO: 14698 - RNA, 22 nt, synthetic construct
  source 1..22: mol_type = other RNA
gtttccaagatgtactgtgcct

SEQ ID NO: 14699 - RNA, 22 nt, synthetic construct
  source 1..22: mol_type = other RNA
gtttcctccccacggtgtggcc

SEQ ID NO: 14700 - RNA, 22 nt, synthetic construct
  source 1..22: mol_type = other RNA
gtttctcttccgctctttcgcg

SEQ ID NO: 14701 - RNA, 22 nt, synthetic construct
  source 1..22: mol_type = other RNA
gtttcttaaaatctcggtgcct

SEQ ID NO: 14702 - RNA, 22 nt, synthetic construct
  source 1..22: mol_type = other RNA
gtttcttcatctgtgagaggca

SEQ ID NO: 14703 - RNA, 22 nt, synthetic construct
  source 1..22: mol_type = other RNA
gtttgctctggagaatctcacg

SEQ ID NO: 14704 - RNA, 22 nt, synthetic construct
  source 1..22: mol_type = other RNA
gtttgtagaatgcttggctgtg

SEQ ID NO: 14705 - RNA, 22 nt, synthetic construct
  source 1..22: mol_type = other RNA
gtttgtgaacgcgtggaggggc

SEQ ID NO: 14706 - RNA, 22 nt, synthetic construct
  source 1..22: mol_type = other RNA
gttttcaaaaccgaaagtaaga

SEQ ID NO: 14707 - RNA, 22 nt, synthetic construct
  source 1..22: mol_type = other RNA
gttttcaaaattaaatgacgca

SEQ ID NO: 14708 - RNA, 22 nt, synthetic construct
  source 1..22: mol_type = other RNA
gttttgaaaacatgagggggtt

SEQ ID NO: 14709 - RNA, 22 nt, synthetic construct
  source 1..22: mol_type = other RNA
taaaagtgacatgtgatgggaa

SEQ ID NO: 14710 - RNA, 22 nt, synthetic construct
  source 1..22: mol_type = other RNA
taaaatctcggtgccttagttt

SEQ ID NO: 14711 - RNA, 22 nt, synthetic construct
  source 1..22: mol_type = other RNA
taaactttgtcccgaccctccc

SEQ ID NO: 14712 - RNA, 22 nt, synthetic construct
  source 1..22: mol_type = other RNA
taaagtccttggcacacagaaa

SEQ ID NO: 14713 - RNA, 22 nt, synthetic construct
  source 1..22: mol_type = other RNA
taaatgacgcaaagcacataaa

SEQ ID NO: 14714 - RNA, 22 nt, synthetic construct
  source 1..22: mol_type = other RNA
taaatggcagcaatcgagattg

SEQ ID NO: 14715 - RNA, 22 nt, synthetic construct
  source 1..22: mol_type = other RNA
taacaaaaattagccgggtgtg

SEQ ID NO: 14716 - RNA, 22 nt, synthetic construct
  source 1..22: mol_type = other RNA
taaccagggcttttgcgggagc

SEQ ID NO: 14717 - RNA, 22 nt, synthetic construct
  source 1..22: mol_type = other RNA
taaccatagtagttatctatgg

SEQ ID NO: 14718 - RNA, 22 nt, synthetic construct
  source 1..22: mol_type = other RNA
taacgggtagttcttataattt

SEQ ID NO: 14719 - RNA, 22 nt, synthetic construct
  source 1..22: mol_type = other RNA
taactactatggttatcttctg

SEQ ID NO: 14720 - RNA, 22 nt, synthetic construct
  source 1..22: mol_type = other RNA
taacttatttgttcccatcaca

SEQ ID NO: 14721 - RNA, 22 nt, synthetic construct
  source 1..22: mol_type = other RNA
taagaaaaacgcctgccttctg

SEQ ID NO: 14722 - RNA, 22 nt, synthetic construct
  source 1..22: mol_type = other RNA
taagaaacttaattacacaggg

SEQ ID NO: 14723 - RNA, 22 nt, synthetic construct
  source 1..22: mol_type = other RNA
taagaactacccgttattgaca

SEQ ID NO: 14724 - RNA, 22 nt, synthetic construct
  source 1..22: mol_type = other RNA
taagaggcacagtacatcttgg

SEQ ID NO: 14725 - RNA, 22 nt, synthetic construct
  source 1..22: mol_type = other RNA
taagcctgtctgctgcggctct

SEQ ID NO: 14726 - RNA, 22 nt, synthetic construct
  source 1..22: mol_type = other RNA
taagcgtcagagcgccgaggtt

SEQ ID NO: 14727 - RNA, 22 nt, synthetic construct
  source 1..22: mol_type = other RNA
taagctaccacgcccaaccccc

SEQ ID NO: 14728 - RNA, 22 nt, synthetic construct
  source 1..22: mol_type = other RNA
taagctcaagagatcctcccgc

SEQ ID NO: 14729 - RNA, 22 nt, synthetic construct
  source 1..22: mol_type = other RNA
taaggcaccgagattttaagaa

SEQ ID NO: 14730 - RNA, 22 nt, synthetic construct
  source 1..22: mol_type = other RNA
taagggaagcagagccgcagca

SEQ ID NO: 14731 - RNA, 22 nt, synthetic construct
  source 1..22: mol_type = other RNA
taagttaattattcgaaaccgc

SEQ ID NO: 14732 - RNA, 22 nt, synthetic construct
  source 1..22: mol_type = other RNA
taagttcgcatgtcctagcacc

SEQ ID NO: 14733 - RNA, 22 nt, synthetic construct
  source 1..22: mol_type = other RNA
taagtttcttaaaatctcggtg

SEQ ID NO: 14734 - RNA, 22 nt, synthetic construct
  source 1..22: mol_type = other RNA
taataacaaaaattagccgggt

SEQ ID NO: 14735 - RNA, 22 nt, synthetic construct
  source 1..22: mol_type = other RNA
taattacacaggggataaatgg

SEQ ID NO: 14736 - RNA, 22 nt, synthetic construct
  source 1..22: mol_type = other RNA
taattattcgaaaccgctttgt

SEQ ID NO: 14737 - RNA, 22 nt, synthetic construct
  source 1..22: mol_type = other RNA
tacaaacgtcgcgtgctgtttc

SEQ ID NO: 14738 - RNA, 22 nt, synthetic construct
  source 1..22: mol_type = other RNA
tacaaagcggtttcgaataatt

SEQ ID NO: 14739 - RNA, 22 nt, synthetic construct
  source 1..22: mol_type = other RNA
tacacaggggataaatggcagc

SEQ ID NO: 14740 - RNA, 22 nt, synthetic construct
  source 1..22: mol_type = other RNA
tacagagggcttcctctttggc

SEQ ID NO: 14741 - RNA, 22 nt, synthetic construct
  source 1..22: mol_type = other RNA
tacagccaaaaggcatgcgctc

SEQ ID NO: 14742 - RNA, 22 nt, synthetic construct
  source 1..22: mol_type = other RNA
tacaggcgtaagctaccacgcc

SEQ ID NO: 14743 - RNA, 22 nt, synthetic construct
  source 1..22: mol_type = other RNA
tacatcttggaaacaaccaggc

SEQ ID NO: 14744 - RNA, 22 nt, synthetic construct
  source 1..22: mol_type = other RNA
taccacgcccaaccccctcatg

SEQ ID NO: 14745 - RNA, 22 nt, synthetic construct
  source 1..22: mol_type = other RNA
tacccgggcgacgcctccccca

SEQ ID NO: 14746 - RNA, 22 nt, synthetic construct
  source 1..22: mol_type = other RNA
tacccgtcccccactccagctg

SEQ ID NO: 14747 - RNA, 22 nt, synthetic construct
  source 1..22: mol_type = other RNA
tacccgttattgacatctttct

SEQ ID NO: 14748 - RNA, 22 nt, synthetic construct
  source 1..22: mol_type = other RNA
taccctcccgctctggtccttc

SEQ ID NO: 14749 - RNA, 22 nt, synthetic construct
  source 1..22: mol_type = other RNA
tacgaaaagaccacagggccca

SEQ ID NO: 14750 - RNA, 22 nt, synthetic construct
  source 1..22: mol_type = other RNA
tacggacctcaagccatcctcc

SEQ ID NO: 14751 - RNA, 22 nt, synthetic construct
  source 1..22: mol_type = other RNA
tacggcgacgggagggtcggga

SEQ ID NO: 14752 - RNA, 22 nt, synthetic construct
  source 1..22: mol_type = other RNA
tactatggttatcttctgcctc

SEQ ID NO: 14753 - RNA, 22 nt, synthetic construct
  source 1..22: mol_type = other RNA
tactgtgcctcttactttcggt

SEQ ID NO: 14754 - RNA, 22 nt, synthetic construct
  source 1..22: mol_type = other RNA
tacttgcccctttcggcgggga

SEQ ID NO: 14755 - RNA, 22 nt, synthetic construct
  source 1..22: mol_type = other RNA
tactttcggttttgaaaacatg

SEQ ID NO: 14756 - RNA, 22 nt, synthetic construct
  source 1..22: mol_type = other RNA
tagaatgcttggctgtgataca

SEQ ID NO: 14757 - RNA, 22 nt, synthetic construct
  source 1..22: mol_type = other RNA
tagacccagaggtgctaggaca

SEQ ID NO: 14758 - RNA, 22 nt, synthetic construct
  source 1..22: mol_type = other RNA
tagacgaagtccacagctctcc

SEQ ID NO: 14759 - RNA, 22 nt, synthetic construct
  source 1..22: mol_type = other RNA
tagactggagagctgtggactt

SEQ ID NO: 14760 - RNA, 22 nt, synthetic construct
  source 1..22: mol_type = other RNA
tagataactactatggttatct

SEQ ID NO: 14761 - RNA, 22 nt, synthetic construct
  source 1..22: mol_type = other RNA
tagcacctctgggtctatgtgg

SEQ ID NO: 14762 - RNA, 22 nt, synthetic construct
  source 1..22: mol_type = other RNA
tagccccacggcgggccaccaa

SEQ ID NO: 14763 - RNA, 22 nt, synthetic construct
  source 1..22: mol_type = other RNA
tagccgggtgtggtggctcgtg

SEQ ID NO: 14764 - RNA, 22 nt, synthetic construct
  source 1..22: mol_type = other RNA
tagcgcgcgtcccgggtgcgca

SEQ ID NO: 14765 - RNA, 22 nt, synthetic construct
  source 1..22: mol_type = other RNA
tagcgggcgcctagacgaagtc

SEQ ID NO: 14766 - RNA, 22 nt, synthetic construct
  source 1..22: mol_type = other RNA
tagctcaaaagcctaagctcaa

SEQ ID NO: 14767 - RNA, 22 nt, synthetic construct
  source 1..22: mol_type = other RNA
taggacatgcgaacttagcggg

SEQ ID NO: 14768 - RNA, 22 nt, synthetic construct
  source 1..22: mol_type = other RNA
taggccaaaggtctcccctgct

SEQ ID NO: 14769 - RNA, 22 nt, synthetic construct
  source 1..22: mol_type = other RNA
taggcgcccgctaagttcgcat

SEQ ID NO: 14770 - RNA, 22 nt, synthetic construct
  source 1..22: mol_type = other RNA
taggctcgtcccaaaggcgcgg

SEQ ID NO: 14771 - RNA, 22 nt, synthetic construct
  source 1..22: mol_type = other RNA
taggcttgacttcaatctcgat

SEQ ID NO: 14772 - RNA, 22 nt, synthetic construct
  source 1..22: mol_type = other RNA
taggcttttgagctatcatggc

SEQ ID NO: 14773 - RNA, 22 nt, synthetic construct
  source 1..22: mol_type = other RNA
tagggaggccgaggcgggagga

SEQ ID NO: 14774 - RNA, 22 nt, synthetic construct
  source 1..22: mol_type = other RNA
tagggcgtcgataagcgtcaga

SEQ ID NO: 14775 - RNA, 22 nt, synthetic construct
  source 1..22: mol_type = other RNA
tagtagttatctatggcggaag

SEQ ID NO: 14776 - RNA, 22 nt, synthetic construct
  source 1..22: mol_type = other RNA
tagtccagggctggatctcggg

SEQ ID NO: 14777 - RNA, 22 nt, synthetic construct
  source 1..22: mol_type = other RNA
tagttatctatggcggaagata

SEQ ID NO: 14778 - RNA, 22 nt, synthetic construct
  source 1..22: mol_type = other RNA
tagtttcttcatctgtgagagg

SEQ ID NO: 14779 - RNA, 22 nt, synthetic construct
  source 1..22: mol_type = other RNA
tataagaactacccgttattga

SEQ ID NO: 14780 - RNA, 22 nt, synthetic construct
  source 1..22: mol_type = other RNA
tatcacagccaagcattctaca

SEQ ID NO: 14781 - RNA, 22 nt, synthetic construct
  source 1..22: mol_type = other RNA
tatcatggcgccagtgcactcc

SEQ ID NO: 14782 - RNA, 22 nt, synthetic construct
  source 1..22: mol_type = other RNA
tatcccctgtgtaattaagttt

SEQ ID NO: 14783 - RNA, 22 nt, synthetic construct
  source 1..22: mol_type = other RNA
tatcgacgccctaaactttgtc

SEQ ID NO: 14784 - RNA, 22 nt, synthetic construct
  source 1..22: mol_type = other RNA
tatctatggcggaagataactg

SEQ ID NO: 14785 - RNA, 22 nt, synthetic construct
  source 1..22: mol_type = other RNA
tatcttccgccatagataacta

SEQ ID NO: 14786 - RNA, 22 nt, synthetic construct
  source 1..22: mol_type = other RNA
tatcttctgcctctcacagatg

SEQ ID NO: 14787 - RNA, 22 nt, synthetic construct
  source 1..22: mol_type = other RNA
tatggcggaagataactgtttt

SEQ ID NO: 14788 - RNA, 22 nt, synthetic construct
  source 1..22: mol_type = other RNA
tatggttatcttctgcctctca

SEQ ID NO: 14789 - RNA, 22 nt, synthetic construct
  source 1..22: mol_type = other RNA
tatgtgctttgcgtcatttaat

SEQ ID NO: 14790 - RNA, 22 nt, synthetic construct
  source 1..22: mol_type = other RNA
tatgtggggccacaccgtgggg

SEQ ID NO: 14791 - RNA, 22 nt, synthetic construct
  source 1..22: mol_type = other RNA
tattattttttgtagagaccag

SEQ ID NO: 14792 - RNA, 22 nt, synthetic construct
  source 1..22: mol_type = other RNA
tattcgaaaccgctttgtatca

SEQ ID NO: 14793 - RNA, 22 nt, synthetic construct
  source 1..22: mol_type = other RNA
tattgacatctttctgtgtgcc

SEQ ID NO: 14794 - RNA, 22 nt, synthetic construct
  source 1..22: mol_type = other RNA
tatttgttcccatcacatgtca

SEQ ID NO: 14795 - RNA, 22 nt, synthetic construct
  source 1..22: mol_type = other RNA
tattttttgtagagaccaggct

SEQ ID NO: 14796 - RNA, 22 nt, synthetic construct
  source 1..22: mol_type = other RNA
tcaaaaccgaaagtaagaggca

SEQ ID NO: 14797 - RNA, 22 nt, synthetic construct
  source 1..22: mol_type = other RNA
tcaaaagcctaagctcaagaga

SEQ ID NO: 14798 - RNA, 22 nt, synthetic construct
  source 1..22: mol_type = other RNA
tcaaaattaaatgacgcaaagc

SEQ ID NO: 14799 - RNA, 22 nt, synthetic construct
  source 1..22: mol_type = other RNA
tcaactacggacctcaagccat

SEQ ID NO: 14800 - RNA, 22 nt, synthetic construct
  source 1..22: mol_type = other RNA
tcaagagatcctcccgcctcag

SEQ ID NO: 14801 - RNA, 22 nt, synthetic construct
  source 1..22: mol_type = other RNA
tcaagccatcctcccgcctcgg

SEQ ID NO: 14802 - RNA, 22 nt, synthetic construct
  source 1..22: mol_type = other RNA
tcaagcctaaccagggcttttg

SEQ ID NO: 14803 - RNA, 22 nt, synthetic construct
  source 1..22: mol_type = other RNA
tcaataacgggtagttcttata

SEQ ID NO: 14804 - RNA, 22 nt, synthetic construct
  source 1..22: mol_type = other RNA
tcaatctcgattgctgccattt

SEQ ID NO: 14805 - RNA, 22 nt, synthetic construct
  source 1..22: mol_type = other RNA
tcacaaacctcagcgccgcgcc

SEQ ID NO: 14806 - RNA, 22 nt, synthetic construct
  source 1..22: mol_type = other RNA
tcacagatgaagaaactaaggc

SEQ ID NO: 14807 - RNA, 22 nt, synthetic construct
  source 1..22: mol_type = other RNA
tcacagccaagcattctacaaa

SEQ ID NO: 14808 - RNA, 22 nt, synthetic construct
  source 1..22: mol_type = other RNA
tcacgcagaaggcaggcgtttt

SEQ ID NO: 14809 - RNA, 22 nt, synthetic construct
  source 1..22: mol_type = other RNA
tcacggagcgagagagcacagc

SEQ ID NO: 14810 - RNA, 22 nt, synthetic construct
  source 1..22: mol_type = other RNA
tcagagcgccgaggttggggga

SEQ ID NO: 14811 - RNA, 22 nt, synthetic construct
  source 1..22: mol_type = other RNA
tcagccaccggagcagctggga

SEQ ID NO: 14812 - RNA, 22 nt, synthetic construct
  source 1..22: mol_type = other RNA
tcagcgccgcgcctttgggacg

SEQ ID NO: 14813 - RNA, 22 nt, synthetic construct
  source 1..22: mol_type = other RNA
tcatctgtgagaggcagaagat

SEQ ID NO: 14814 - RNA, 22 nt, synthetic construct
  source 1..22: mol_type = other RNA
tcatggcgccagtgcactccag

SEQ ID NO: 14815 - RNA, 22 nt, synthetic construct
  source 1..22: mol_type = other RNA
tcatgttttcaaaaccgaaagt

SEQ ID NO: 14816 - RNA, 22 nt, synthetic construct
  source 1..22: mol_type = other RNA
tccaagatgtactgtgcctctt

SEQ ID NO: 14817 - RNA, 22 nt, synthetic construct
  source 1..22: mol_type = other RNA
tccaagttctccttggtggccc

SEQ ID NO: 14818 - RNA, 22 nt, synthetic construct
  source 1..22: mol_type = other RNA
tccacagctctccagtctaagg

SEQ ID NO: 14819 - RNA, 22 nt, synthetic construct
  source 1..22: mol_type = other RNA
tccacgcgttcacaaacctcag

SEQ ID NO: 14820 - RNA, 22 nt, synthetic construct
  source 1..22: mol_type = other RNA
tccagagcaaactgggcggcat

SEQ ID NO: 14821 - RNA, 22 nt, synthetic construct
  source 1..22: mol_type = other RNA
tccagccctggactagccccac

SEQ ID NO: 14822 - RNA, 22 nt, synthetic construct
  source 1..22: mol_type = other RNA
tccagctgcgctgggggagcca

SEQ ID NO: 14823 - RNA, 22 nt, synthetic construct
  source 1..22: mol_type = other RNA
tccagggctggatctcggggaa

SEQ ID NO: 14824 - RNA, 22 nt, synthetic construct
  source 1..22: mol_type = other RNA
tccagtctaagggaagcagagc

SEQ ID NO: 14825 - RNA, 22 nt, synthetic construct
  source 1..22: mol_type = other RNA
tcccaaaggcgcggcgctgagg

SEQ ID NO: 14826 - RNA, 22 nt, synthetic construct
  source 1..22: mol_type = other RNA
tcccagctgctccggtggctga

SEQ ID NO: 14827 - RNA, 22 nt, synthetic construct
  source 1..22: mol_type = other RNA
tcccaggccaccccgccgcttc

SEQ ID NO: 14828 - RNA, 22 nt, synthetic construct
  source 1..22: mol_type = other RNA
tcccatcacatgtcacttttaa

SEQ ID NO: 14829 - RNA, 22 nt, synthetic construct
  source 1..22: mol_type = other RNA
tccccacggtgtggccccacat

SEQ ID NO: 14830 - RNA, 22 nt, synthetic construct
  source 1..22: mol_type = other RNA
tccccactcccaggccaccccg

SEQ ID NO: 14831 - RNA, 22 nt, synthetic construct
  source 1..22: mol_type = other RNA
tcccccaacctcggcgctctga

SEQ ID NO: 14832 - RNA, 22 nt, synthetic construct
  source 1..22: mol_type = other RNA
tcccccactccagctgcgctgg

SEQ ID NO: 14833 - RNA, 22 nt, synthetic construct
  source 1..22: mol_type = other RNA
tcccccagaccccaagcgcccc

SEQ ID NO: 14834 - RNA, 22 nt, synthetic construct
  source 1..22: mol_type = other RNA
tcccccagcgcagctggagtgg

SEQ ID NO: 14835 - RNA, 22 nt, synthetic construct
  source 1..22: mol_type = other RNA
tccccgagatccagccctggac

SEQ ID NO: 14836 - RNA, 22 nt, synthetic construct
  source 1..22: mol_type = other RNA
tccccgccgaaaggggcaagta

SEQ ID NO: 14837 - RNA, 22 nt, synthetic construct
  source 1..22: mol_type = other RNA
tcccctgctccccgccgaaagg

SEQ ID NO: 14838 - RNA, 22 nt, synthetic construct
  source 1..22: mol_type = other RNA
tcccctgtgtaattaagtttct

SEQ ID NO: 14839 - RNA, 22 nt, synthetic construct
  source 1..22: mol_type = other RNA
tcccgaccctcccgtcgccgta

SEQ ID NO: 14840 - RNA, 22 nt, synthetic construct
  source 1..22: mol_type = other RNA
tcccgcaaaagccctggttagg

SEQ ID NO: 14841 - RNA, 22 nt, synthetic construct
  source 1..22: mol_type = other RNA
tcccgcctcagccaccggagca

SEQ ID NO: 14842 - RNA, 22 nt, synthetic construct
  source 1..22: mol_type = other RNA
tcccgctctgcaccctctgtgg

SEQ ID NO: 14843 - RNA, 22 nt, synthetic construct
  source 1..22: mol_type = other RNA
tcccgctctggtccttcctctc

SEQ ID NO: 14844 - RNA, 22 nt, synthetic construct
  source 1..22: mol_type = other RNA
tcccgggtgcgcacccccttcc

SEQ ID NO: 14845 - RNA, 22 nt, synthetic construct
  source 1..22: mol_type = other RNA
tcccgtcgccgtaggccaaagg

SEQ ID NO: 14846 - RNA, 22 nt, synthetic construct
  source 1..22: mol_type = other RNA
tcccttagactggagagctgtg

SEQ ID NO: 14847 - RNA, 22 nt, synthetic construct
  source 1..22: mol_type = other RNA
tcccttctccaagttctccttg

SEQ ID NO: 14848 - RNA, 22 nt, synthetic construct
  source 1..22: mol_type = other RNA
tccgccatagataactactatg

SEQ ID NO: 14849 - RNA, 22 nt, synthetic construct
  source 1..22: mol_type = other RNA
tccgctctttcgcggggcctct

SEQ ID NO: 14850 - RNA, 22 nt, synthetic construct
  source 1..22: mol_type = other RNA
tccggtggctgaggcgggagga

SEQ ID NO: 14851 - RNA, 22 nt, synthetic construct
  source 1..22: mol_type = other RNA
tccgtagttgagaccagcctgg

SEQ ID NO: 14852 - RNA, 22 nt, synthetic construct
  source 1..22: mol_type = other RNA
tccgtgacttcccttctccaag

SEQ ID NO: 14853 - RNA, 22 nt, synthetic construct
  source 1..22: mol_type = other RNA
tcctaccctcccgctctggtcc

SEQ ID NO: 14854 - RNA, 22 nt, synthetic construct
  source 1..22: mol_type = other RNA
tcctagcacctctgggtctatg

SEQ ID NO: 14855 - RNA, 22 nt, synthetic construct
  source 1..22: mol_type = other RNA
tcctccccacggtgtggcccca

SEQ ID NO: 14856 - RNA, 22 nt, synthetic construct
  source 1..22: mol_type = other RNA
tcctcccgcctcagccaccgga

SEQ ID NO: 14857 - RNA, 22 nt, synthetic construct
  source 1..22: mol_type = other RNA
tcctctcccgctctgcaccctc

SEQ ID NO: 14858 - RNA, 22 nt, synthetic construct
  source 1..22: mol_type = other RNA
tcctctttggctctttgcctgg

SEQ ID NO: 14859 - RNA, 22 nt, synthetic construct
  source 1..22: mol_type = other RNA
tccttcctctcccgctctgcac

SEQ ID NO: 14860 - RNA, 22 nt, synthetic construct
  source 1..22: mol_type = other RNA
tccttggcacacagaaagatgt

SEQ ID NO: 14861 - RNA, 22 nt, synthetic construct
  source 1..22: mol_type = other RNA
tccttggtggcccgccgtgggg

SEQ ID NO: 14862 - RNA, 22 nt, synthetic construct
  source 1..22: mol_type = other RNA
tcgaaaccgctttgtatcacag

SEQ ID NO: 14863 - RNA, 22 nt, synthetic construct
  source 1..22: mol_type = other RNA
tcgacgccctaaactttgtccc

SEQ ID NO: 14864 - RNA, 22 nt, synthetic construct
  source 1..22: mol_type = other RNA
tcgagattgaagtcaagcctaa

SEQ ID NO: 14865 - RNA, 22 nt, synthetic construct
  source 1..22: mol_type = other RNA
tcgataagcgtcagagcgccga

SEQ ID NO: 14866 - RNA, 22 nt, synthetic construct
  source 1..22: mol_type = other RNA
tcgattgctgccatttatcccc

SEQ ID NO: 14867 - RNA, 22 nt, synthetic construct
  source 1..22: mol_type = other RNA
tcgcatgtcctagcacctctgg

SEQ ID NO: 14868 - RNA, 22 nt, synthetic construct
  source 1..22: mol_type = other RNA
tcgcccgggtaagcctgtctgc

SEQ ID NO: 14869 - RNA, 22 nt, synthetic construct
  source 1..22: mol_type = other RNA
tcgccgtaggccaaaggtctcc

SEQ ID NO: 14870 - RNA, 22 nt, synthetic construct
  source 1..22: mol_type = other RNA
tcgcgtgctgtttcctccccac

SEQ ID NO: 14871 - RNA, 22 nt, synthetic construct
  source 1..22: mol_type = other RNA
tcgctccgtgacttcccttctc

SEQ ID NO: 14872 - RNA, 22 nt, synthetic construct
  source 1..22: mol_type = other RNA
tcgctctgttgcccacgctgga

SEQ ID NO: 14873 - RNA, 22 nt, synthetic construct
  source 1..22: mol_type = other RNA
tcgctgtgctctctcgctccgt

SEQ ID NO: 14874 - RNA, 22 nt, synthetic construct
  source 1..22: mol_type = other RNA
tcggcgctctgacgcttatcga

SEQ ID NO: 14875 - RNA, 22 nt, synthetic construct
  source 1..22: mol_type = other RNA
tcggcggggagcaggggagacc

SEQ ID NO: 14876 - RNA, 22 nt, synthetic construct
  source 1..22: mol_type = other RNA
tcgggacaaagtttagggcgtc

SEQ ID NO: 14877 - RNA, 22 nt, synthetic construct
  source 1..22: mol_type = other RNA
tcggtgccttagtttcttcatc

SEQ ID NO: 14878 - RNA, 22 nt, synthetic construct
  source 1..22: mol_type = other RNA
tcggttttgaaaacatgagggg

SEQ ID NO: 14879 - RNA, 22 nt, synthetic construct
  source 1..22: mol_type = other RNA
tcgtacagagggcttcctcttt

SEQ ID NO: 14880 - RNA, 22 nt, synthetic construct
  source 1..22: mol_type = other RNA
tcgtcccaaaggcgcggcgctg

SEQ ID NO: 14881 - RNA, 22 nt, synthetic construct
  source 1..22: mol_type = other RNA
tcgtctaggcgcccgctaagtt

SEQ ID NO: 14882 - RNA, 22 nt, synthetic construct
  source 1..22: mol_type = other RNA
tcgtgcctgtggtcccagctgc

SEQ ID NO: 14883 - RNA, 22 nt, synthetic construct
  source 1..22: mol_type = other RNA
tctaagggaagcagagccgcag

SEQ ID NO: 14884 - RNA, 22 nt, synthetic construct
  source 1..22: mol_type = other RNA
tctacaaacgtcgcgtgctgtt

SEQ ID NO: 14885 - RNA, 22 nt, synthetic construct
  source 1..22: mol_type = other RNA
tctaggcgcccgctaagttcgc

SEQ ID NO: 14886 - RNA, 22 nt, synthetic construct
  source 1..22: mol_type = other RNA
tctatggcggaagataactgtt

SEQ ID NO: 14887 - RNA, 22 nt, synthetic construct
  source 1..22: mol_type = other RNA
tctatgtggggccacaccgtgg

SEQ ID NO: 14888 - RNA, 22 nt, synthetic construct
  source 1..22: mol_type = other RNA
tctcaactacggacctcaagcc

SEQ ID NO: 14889 - RNA, 22 nt, synthetic construct
  source 1..22: mol_type = other RNA
tctcacagatgaagaaactaag

SEQ ID NO: 14890 - RNA, 22 nt, synthetic construct
  source 1..22: mol_type = other RNA
tctcacgcagaaggcaggcgtt

SEQ ID NO: 14891 - RNA, 22 nt, synthetic construct
  source 1..22: mol_type = other RNA
tctccaagttctccttggtggc

SEQ ID NO: 14892 - RNA, 22 nt, synthetic construct
  source 1..22: mol_type = other RNA
tctccagagcaaactgggcggc

SEQ ID NO: 14893 - RNA, 22 nt, synthetic construct
  source 1..22: mol_type = other RNA
tctccagtctaagggaagcaga

SEQ ID NO: 14894 - RNA, 22 nt, synthetic construct
  source 1..22: mol_type = other RNA
tctcccctgctccccgccgaaa

SEQ ID NO: 14895 - RNA, 22 nt, synthetic construct
  source 1..22: mol_type = other RNA
tctcccgctctgcaccctctgt

SEQ ID NO: 14896 - RNA, 22 nt, synthetic construct
  source 1..22: mol_type = other RNA
tctcctaccctcccgctctggt

SEQ ID NO: 14897 - RNA, 22 nt, synthetic construct
  source 1..22: mol_type = other RNA
tctccttggtggcccgccgtgg

SEQ ID NO: 14898 - RNA, 22 nt, synthetic construct
  source 1..22: mol_type = other RNA
tctcgattgctgccatttatcc

SEQ ID NO: 14899 - RNA, 22 nt, synthetic construct
  source 1..22: mol_type = other RNA
tctcgctccgtgacttcccttc

SEQ ID NO: 14900 - RNA, 22 nt, synthetic construct
  source 1..22: mol_type = other RNA
tctcgctctgttgcccacgctg

SEQ ID NO: 14901 - RNA, 22 nt, synthetic construct
  source 1..22: mol_type = other RNA
tctcggggaagcggcggggtgg

SEQ ID NO: 14902 - RNA, 22 nt, synthetic construct
  source 1..22: mol_type = other RNA
tctcggtgccttagtttcttca

SEQ ID NO: 14903 - RNA, 22 nt, synthetic construct
  source 1..22: mol_type = other RNA
tctctcctaccctcccgctctg

SEQ ID NO: 14904 - RNA, 22 nt, synthetic construct
  source 1..22: mol_type = other RNA
tctctcgctccgtgacttccct

SEQ ID NO: 14905 - RNA, 22 nt, synthetic construct
  source 1..22: mol_type = other RNA
tctcttccgctctttcgcgggg

SEQ ID NO: 14906 - RNA, 22 nt, synthetic construct
  source 1..22: mol_type = other RNA
tctcttgagcttaggcttttga

SEQ ID NO: 14907 - RNA, 22 nt, synthetic construct
  source 1..22: mol_type = other RNA
tctgacgcttatcgacgcccta

SEQ ID NO: 14908 - RNA, 22 nt, synthetic construct
  source 1..22: mol_type = other RNA
tctgcaccctctgtggccctcg

SEQ ID NO: 14909 - RNA, 22 nt, synthetic construct
  source 1..22: mol_type = other RNA
tctgcctctcacagatgaagaa

SEQ ID NO: 14910 - RNA, 22 nt, synthetic construct
  source 1..22: mol_type = other RNA
tctgcgtgagattctccagagc

SEQ ID NO: 14911 - RNA, 22 nt, synthetic construct
  source 1..22: mol_type = other RNA
tctgctgcggctctgcttccct

SEQ ID NO: 14912 - RNA, 22 nt, synthetic construct
  source 1..22: mol_type = other RNA
tctgcttcccttagactggaga

SEQ ID NO: 14913 - RNA, 22 nt, synthetic construct
  source 1..22: mol_type = other RNA
tctggagaatctcacgcagaag

SEQ ID NO: 14914 - RNA, 22 nt, synthetic construct
  source 1..22: mol_type = other RNA
tctggctcccccagcgcagctg

SEQ ID NO: 14915 - RNA, 22 nt, synthetic construct
  source 1..22: mol_type = other RNA
tctgggtctatgtggggccaca

SEQ ID NO: 14916 - RNA, 22 nt, synthetic construct
  source 1..22: mol_type = other RNA
tctggtccttcctctcccgctc

SEQ ID NO: 14917 - RNA, 22 nt, synthetic construct
  source 1..22: mol_type = other RNA
tctgtacgaaaagaccacaggg

SEQ ID NO: 14918 - RNA, 22 nt, synthetic construct
  source 1..22: mol_type = other RNA
tctgtgagaggcagaagataac

SEQ ID NO: 14919 - RNA, 22 nt, synthetic construct
  source 1..22: mol_type = other RNA
tctgtggccctcgctgtgctct

SEQ ID NO: 14920 - RNA, 22 nt, synthetic construct
  source 1..22: mol_type = other RNA
tctgtgtgccaaggactttatg

SEQ ID NO: 14921 - RNA, 22 nt, synthetic construct
  source 1..22: mol_type = other RNA
tctgttgcccacgctggagtgc

SEQ ID NO: 14922 - RNA, 22 nt, synthetic construct
  source 1..22: mol_type = other RNA
tcttaaaatctcggtgccttag

SEQ ID NO: 14923 - RNA, 22 nt, synthetic construct
  source 1..22: mol_type = other RNA
tcttactttcggttttgaaaac

SEQ ID NO: 14924 - RNA, 22 nt, synthetic construct
  source 1..22: mol_type = other RNA
tcttcatctgtgagaggcagaa

SEQ ID NO: 14925 - RNA, 22 nt, synthetic construct
  source 1..22: mol_type = other RNA
tcttccgccatagataactact

SEQ ID NO: 14926 - RNA, 22 nt, synthetic construct
  source 1..22: mol_type = other RNA
tcttccgctctttcgcggggcc

SEQ ID NO: 14927 - RNA, 22 nt, synthetic construct
  source 1..22: mol_type = other RNA
tcttctgcctctcacagatgaa

SEQ ID NO: 14928 - RNA, 22 nt, synthetic construct
  source 1..22: mol_type = other RNA
tcttgagcttaggcttttgagc

SEQ ID NO: 14929 - RNA, 22 nt, synthetic construct
  source 1..22: mol_type = other RNA
tcttggaaacaaccaggcaaag

SEQ ID NO: 14930 - RNA, 22 nt, synthetic construct
  source 1..22: mol_type = other RNA
tctttcgcggggcctctggctc

SEQ ID NO: 14931 - RNA, 22 nt, synthetic construct
  source 1..22: mol_type = other RNA
tctttctgtgtgccaaggactt

SEQ ID NO: 14932 - RNA, 22 nt, synthetic construct
  source 1..22: mol_type = other RNA
tctttgcctggttgtttccaag

SEQ ID NO: 14933 - RNA, 22 nt, synthetic construct
  source 1..22: mol_type = other RNA
tctttggctctttgcctggttg

SEQ ID NO: 14934 - RNA, 22 nt, synthetic construct
  source 1..22: mol_type = other RNA
tcttttcgtacagagggcttcc

SEQ ID NO: 14935 - RNA, 22 nt, synthetic construct
  source 1..22: mol_type = other RNA
tgaaaacagttatcttccgcca

SEQ ID NO: 14936 - RNA, 22 nt, synthetic construct
  source 1..22: mol_type = other RNA
tgaaaacatgagggggttgggc

SEQ ID NO: 14937 - RNA, 22 nt, synthetic construct
  source 1..22: mol_type = other RNA
tgaacgcgtggaggggcgcttg

SEQ ID NO: 14938 - RNA, 22 nt, synthetic construct
  source 1..22: mol_type = other RNA
tgaagaaactaaggcaccgaga

SEQ ID NO: 14939 - RNA, 22 nt, synthetic construct
  source 1..22: mol_type = other RNA
tgaagcctggtctctacaaaaa

SEQ ID NO: 14940 - RNA, 22 nt, synthetic construct
  source 1..22: mol_type = other RNA
tgaagtcaagcctaaccagggc

SEQ ID NO: 14941 - RNA, 22 nt, synthetic construct
  source 1..22: mol_type = other RNA
tgacatctttctgtgtgccaag

SEQ ID NO: 14942 - RNA, 22 nt, synthetic construct
  source 1..22: mol_type = other RNA
tgacatgtgatgggaacaaata

SEQ ID NO: 14943 - RNA, 22 nt, synthetic construct
  source 1..22: mol_type = other RNA
tgacgcaaagcacataaagtcc

SEQ ID NO: 14944 - RNA, 22 nt, synthetic construct
  source 1..22: mol_type = other RNA
tgacgcttatcgacgccctaaa

SEQ ID NO: 14945 - RNA, 22 nt, synthetic construct
  source 1..22: mol_type = other RNA
tgacttcaatctcgattgctgc

SEQ ID NO: 14946 - RNA, 22 nt, synthetic construct
  source 1..22: mol_type = other RNA
tgacttcccttctccaagttct

SEQ ID NO: 14947 - RNA, 22 nt, synthetic construct
  source 1..22: mol_type = other RNA
tgagagacagggtctcgctctg

SEQ ID NO: 14948 - RNA, 22 nt, synthetic construct
  source 1..22: mol_type = other RNA
tgagaggcagaagataaccata

SEQ ID NO: 14949 - RNA, 22 nt, synthetic construct
  source 1..22: mol_type = other RNA
tgagattctccagagcaaactg

SEQ ID NO: 14950 - RNA, 22 nt, synthetic construct
  source 1..22: mol_type = other RNA
tgagctatcatggcgccagtgc

SEQ ID NO: 14951 - RNA, 22 nt, synthetic construct
  source 1..22: mol_type = other RNA
tgagcttaggcttttgagctat

SEQ ID NO: 14952 - RNA, 22 nt, synthetic construct
  source 1..22: mol_type = other RNA
tgaggcgggaggatctcttgag

SEQ ID NO: 14953 - RNA, 22 nt, synthetic construct
  source 1..22: mol_type = other RNA
tgagggggttgggcgtggtagc

SEQ ID NO: 14954 - RNA, 22 nt, synthetic construct
  source 1..22: mol_type = other RNA
tgaggtccgtagttgagaccag

SEQ ID NO: 14955 - RNA, 22 nt, synthetic construct
  source 1..22: mol_type = other RNA
tgaggtttgtgaacgcgtggag

SEQ ID NO: 14956 - RNA, 22 nt, synthetic construct
  source 1..22: mol_type = other RNA
tgagtctctcctaccctcccgc

SEQ ID NO: 14957 - RNA, 22 nt, synthetic construct
  source 1..22: mol_type = other RNA
tgatacaaagcggtttcgaata

SEQ ID NO: 14958 - RNA, 22 nt, synthetic construct
  source 1..22: mol_type = other RNA
tgatagctcaaaagcctaagct

SEQ ID NO: 14959 - RNA, 22 nt, synthetic construct
  source 1..22: mol_type = other RNA
tgatgggaacaaataagttaat

SEQ ID NO: 14960 - RNA, 22 nt, synthetic construct
  source 1..22: mol_type = other RNA
tgcaccctctgtggccctcgct

SEQ ID NO: 14961 - RNA, 22 nt, synthetic construct
  source 1..22: mol_type = other RNA
tgcacgaattacagccaaaagg

SEQ ID NO: 14962 - RNA, 22 nt, synthetic construct
  source 1..22: mol_type = other RNA
tgcactggcgccatgatagctc

SEQ ID NO: 14963 - RNA, 22 nt, synthetic construct
  source 1..22: mol_type = other RNA
tgcagagcgggagaggaaggac

SEQ ID NO: 14964 - RNA, 22 nt, synthetic construct
  source 1..22: mol_type = other RNA
tgccaaggactttatgtgcttt

SEQ ID NO: 14965 - RNA, 22 nt, synthetic construct
  source 1..22: mol_type = other RNA
tgccatttatcccctgtgtaat

SEQ ID NO: 14966 - RNA, 22 nt, synthetic construct
  source 1..22: mol_type = other RNA
tgcccacgctggagtgcactgg

SEQ ID NO: 14967 - RNA, 22 nt, synthetic construct
  source 1..22: mol_type = other RNA
tgcccctttcggcggggagcag

SEQ ID NO: 14968 - RNA, 22 nt, synthetic construct
  source 1..22: mol_type = other RNA
tgccgcccagtttgctctggag

SEQ ID NO: 14969 - RNA, 22 nt, synthetic construct
  source 1..22: mol_type = other RNA
tgcctctcacagatgaagaaac

SEQ ID NO: 14970 - RNA, 22 nt, synthetic construct
  source 1..22: mol_type = other RNA
tgcctcttactttcggttttga

SEQ ID NO: 14971 - RNA, 22 nt, synthetic construct
  source 1..22: mol_type = other RNA
tgcctggttgtttccaagatgt

SEQ ID NO: 14972 - RNA, 22 nt, synthetic construct
  source 1..22: mol_type = other RNA
tgcctgtggtcccagctgctcc

SEQ ID NO: 14973 - RNA, 22 nt, synthetic construct
  source 1..22: mol_type = other RNA
tgccttagtttcttcatctgtg

SEQ ID NO: 14974 - RNA, 22 nt, synthetic construct
  source 1..22: mol_type = other RNA
tgccttctgcgtgagattctcc

SEQ ID NO: 14975 - RNA, 22 nt, synthetic construct
  source 1..22: mol_type = other RNA
tgccttttggctgtaattcgtg

SEQ ID NO: 14976 - RNA, 22 nt, synthetic construct
  source 1..22: mol_type = other RNA
tgcgaacttagcgggcgcctag

SEQ ID NO: 14977 - RNA, 22 nt, synthetic construct
  source 1..22: mol_type = other RNA
tgcgcacccccttccccactcc

SEQ ID NO: 14978 - RNA, 22 nt, synthetic construct
  source 1..22: mol_type = other RNA
tgcgcacccgggacgcgcgcta

SEQ ID NO: 14979 - RNA, 22 nt, synthetic construct
  source 1..22: mol_type = other RNA
tgcgctcccgcaaaagccctgg

SEQ ID NO: 14980 - RNA, 22 nt, synthetic construct
  source 1..22: mol_type = other RNA
tgcgctgggggagccagaggcc

SEQ ID NO: 14981 - RNA, 22 nt, synthetic construct
  source 1..22: mol_type = other RNA
tgcggctctgcttcccttagac

SEQ ID NO: 14982 - RNA, 22 nt, synthetic construct
  source 1..22: mol_type = other RNA
tgcgggagcgcatgccttttgg

SEQ ID NO: 14983 - RNA, 22 nt, synthetic construct
  source 1..22: mol_type = other RNA
tgcgtcatttaattttgaaaac

SEQ ID NO: 14984 - RNA, 22 nt, synthetic construct
  source 1..22: mol_type = other RNA
tgcgtgagattctccagagcaa

SEQ ID NO: 14985 - RNA, 22 nt, synthetic construct
  source 1..22: mol_type = other RNA
tgctaggacatgcgaacttagc

SEQ ID NO: 14986 - RNA, 22 nt, synthetic construct
  source 1..22: mol_type = other RNA
tgctccccgccgaaaggggcaa

SEQ ID NO: 14987 - RNA, 22 nt, synthetic construct
  source 1..22: mol_type = other RNA
tgctccggtggctgaggcggga

SEQ ID NO: 14988 - RNA, 22 nt, synthetic construct
  source 1..22: mol_type = other RNA
tgctctctcgctccgtgacttc

SEQ ID NO: 14989 - RNA, 22 nt, synthetic construct
  source 1..22: mol_type = other RNA
tgctctggagaatctcacgcag

SEQ ID NO: 14990 - RNA, 22 nt, synthetic construct
  source 1..22: mol_type = other RNA
tgctgccatttatcccctgtgt

SEQ ID NO: 14991 - RNA, 22 nt, synthetic construct
  source 1..22: mol_type = other RNA
tgctgcggctctgcttccctta

SEQ ID NO: 14992 - RNA, 22 nt, synthetic construct
  source 1..22: mol_type = other RNA
tgctgtttcctccccacggtgt

SEQ ID NO: 14993 - RNA, 22 nt, synthetic construct
  source 1..22: mol_type = other RNA
tgcttcccttagactggagagc

SEQ ID NO: 14994 - RNA, 22 nt, synthetic construct
  source 1..22: mol_type = other RNA
tgcttggctgtgatacaaagcg

SEQ ID NO: 14995 - RNA, 22 nt, synthetic construct
  source 1..22: mol_type = other RNA
tgctttgcgtcatttaattttg

SEQ ID NO: 14996 - RNA, 22 nt, synthetic construct
  source 1..22: mol_type = other RNA
tggaaacaaccaggcaaagagc

SEQ ID NO: 14997 - RNA, 22 nt, synthetic construct
  source 1..22: mol_type = other RNA
tggactagccccacggcgggcc

SEQ ID NO: 14998 - RNA, 22 nt, synthetic construct
  source 1..22: mol_type = other RNA
tggacttcgtctaggcgcccgc

SEQ ID NO: 14999 - RNA, 22 nt, synthetic construct
  source 1..22: mol_type = other RNA
tggagaagggaagtcacggagc

SEQ ID NO: 15000 - RNA, 22 nt, synthetic construct
  source 1..22: mol_type = other RNA
tggagaatctcacgcagaaggc

SEQ ID NO: 15001 - RNA, 22 nt, synthetic construct
  source 1..22: mol_type = other RNA
tggagagctgtggacttcgtct

SEQ ID NO: 15002 - RNA, 22 nt, synthetic construct
  source 1..22: mol_type = other RNA
tggaggggcgcttggggtctgg

SEQ ID NO: 15003 - RNA, 22 nt, synthetic construct
  source 1..22: mol_type = other RNA
tggagtgcactggcgccatgat

SEQ ID NO: 15004 - RNA, 22 nt, synthetic construct
  source 1..22: mol_type = other RNA
tggagtgggggacgggtaggct

SEQ ID NO: 15005 - RNA, 22 nt, synthetic construct
  source 1..22: mol_type = other RNA
tggatctcggggaagcggcggg

SEQ ID NO: 15006 - RNA, 22 nt, synthetic construct
  source 1..22: mol_type = other RNA
tggcacacagaaagatgtcaat

SEQ ID NO: 15007 - RNA, 22 nt, synthetic construct
  source 1..22: mol_type = other RNA
tggcagcaatcgagattgaagt

SEQ ID NO: 15008 - RNA, 22 nt, synthetic construct
  source 1..22: mol_type = other RNA
tggccaacatggtgaagcctgg

SEQ ID NO: 15009 - RNA, 22 nt, synthetic construct
  source 1..22: mol_type = other RNA
tggccaggctggtctcaactac

SEQ ID NO: 15010 - RNA, 22 nt, synthetic construct
  source 1..22: mol_type = other RNA
tggccccacatagacccagagg

SEQ ID NO: 15011 - RNA, 22 nt, synthetic construct
  source 1..22: mol_type = other RNA
tggcccgccgtggggctagtcc

SEQ ID NO: 15012 - RNA, 22 nt, synthetic construct
  source 1..22: mol_type = other RNA
tggccctcgctgtgctctctcg

SEQ ID NO: 15013 - RNA, 22 nt, synthetic construct
  source 1..22: mol_type = other RNA
tggcctacggcgacgggagggt

SEQ ID NO: 15014 - RNA, 22 nt, synthetic construct
  source 1..22: mol_type = other RNA
tggcctgggagtggggaagggg

SEQ ID NO: 15015 - RNA, 22 nt, synthetic construct
  source 1..22: mol_type = other RNA
tggcgccagtgcactccagcgt

SEQ ID NO: 15016 - RNA, 22 nt, synthetic construct
  source 1..22: mol_type = other RNA
tggcgccatgatagctcaaaag

SEQ ID NO: 15017 - RNA, 22 nt, synthetic construct
  source 1..22: mol_type = other RNA
tggcggaagataactgttttca

SEQ ID NO: 15018 - RNA, 22 nt, synthetic construct
  source 1..22: mol_type = other RNA
tggctcccccagcgcagctgga

SEQ ID NO: 15019 - RNA, 22 nt, synthetic construct
  source 1..22: mol_type = other RNA
tggctcgtgcctgtggtcccag

SEQ ID NO: 15020 - RNA, 22 nt, synthetic construct
  source 1..22: mol_type = other RNA
tggctctttgcctggttgtttc

SEQ ID NO: 15021 - RNA, 22 nt, synthetic construct
  source 1..22: mol_type = other RNA
tggctgaggcgggaggatctct

SEQ ID NO: 15022 - RNA, 22 nt, synthetic construct
  source 1..22: mol_type = other RNA
tggctgtaattcgtgcattttt

SEQ ID NO: 15023 - RNA, 22 nt, synthetic construct
  source 1..22: mol_type = other RNA
tggctgtgatacaaagcggttt

SEQ ID NO: 15024 - RNA, 22 nt, synthetic construct
  source 1..22: mol_type = other RNA
tggcttgaggtccgtagttgag

SEQ ID NO: 15025 - RNA, 22 nt, synthetic construct
  source 1..22: mol_type = other RNA
tgggaccacaggcacgagccac

SEQ ID NO: 15026 - RNA, 22 nt, synthetic construct
  source 1..22: mol_type = other RNA
tgggacgagcctacccgtcccc

SEQ ID NO: 15027 - RNA, 22 nt, synthetic construct
  source 1..22: mol_type = other RNA
tgggagtggggaagggggtgcg

SEQ ID NO: 15028 - RNA, 22 nt, synthetic construct
  source 1..22: mol_type = other RNA
tgggccctgtggtcttttcgta

SEQ ID NO: 15029 - RNA, 22 nt, synthetic construct
  source 1..22: mol_type = other RNA
tgggcggcatgggccctgtggt

SEQ ID NO: 15030 - RNA, 22 nt, synthetic construct
  source 1..22: mol_type = other RNA
tggggaagggggtgcgcacccg

SEQ ID NO: 15031 - RNA, 22 nt, synthetic construct
  source 1..22: mol_type = other RNA
tggggaggaaacagcacgcgac

SEQ ID NO: 15032 - RNA, 22 nt, synthetic construct
  source 1..22: mol_type = other RNA
tggggccacaccgtggggagga

SEQ ID NO: 15033 - RNA, 22 nt, synthetic construct
  source 1..22: mol_type = other RNA
tggggctagtccagggctggat

SEQ ID NO: 15034 - RNA, 22 nt, synthetic construct
  source 1..22: mol_type = other RNA
tgggggacgggtaggctcgtcc

SEQ ID NO: 15035 - RNA, 22 nt, synthetic construct
  source 1..22: mol_type = other RNA
tgggggaggcgtcgcccgggta

SEQ ID NO: 15036 - RNA, 22 nt, synthetic construct
  source 1..22: mol_type = other RNA
tgggggagggtttctcttccgc

SEQ ID NO: 15037 - RNA, 22 nt, synthetic construct
  source 1..22: mol_type = other RNA
tggggtctgggggaggcgtcgc

SEQ ID NO: 15038 - RNA, 22 nt, synthetic construct
  source 1..22: mol_type = other RNA
tgggtctatgtggggccacacc

SEQ ID NO: 15039 - RNA, 22 nt, synthetic construct
  source 1..22: mol_type = other RNA
tggtcccagctgctccggtggc

SEQ ID NO: 15040 - RNA, 22 nt, synthetic construct
  source 1..22: mol_type = other RNA
tggtccttcctctcccgctctg

SEQ ID NO: 15041 - RNA, 22 nt, synthetic construct
  source 1..22: mol_type = other RNA
tggtctcaactacggacctcaa

SEQ ID NO: 15042 - RNA, 22 nt, synthetic construct
  source 1..22: mol_type = other RNA
tggtcttttcgtacagagggct

SEQ ID NO: 15043 - RNA, 22 nt, synthetic construct
  source 1..22: mol_type = other RNA
tggtgaagcctggtctctacaa

SEQ ID NO: 15044 - RNA, 22 nt, synthetic construct
  source 1..22: mol_type = other RNA
tggtggcccgccgtggggctag

SEQ ID NO: 15045 - RNA, 22 nt, synthetic construct
  source 1..22: mol_type = other RNA
tggtggctcgtgcctgtggtcc

SEQ ID NO: 15046 - RNA, 22 nt, synthetic construct
  source 1..22: mol_type = other RNA
tggttaggcttgacttcaatct

SEQ ID NO: 15047 - RNA, 22 nt, synthetic construct
  source 1..22: mol_type = other RNA
tggttatcttctgcctctcaca

SEQ ID NO: 15048 - RNA, 22 nt, synthetic construct
  source 1..22: mol_type = other RNA
tggttgtttccaagatgtactg

SEQ ID NO: 15049 - RNA, 22 nt, synthetic construct
  source 1..22: mol_type = other RNA
tgtacgaaaagaccacagggcc

SEQ ID NO: 15050 - RNA, 22 nt, synthetic construct
  source 1..22: mol_type = other RNA
tgtactgtgcctcttactttcg

SEQ ID NO: 15051 - RNA, 22 nt, synthetic construct
  source 1..22: mol_type = other RNA
tgtagaatgcttggctgtgata

SEQ ID NO: 15052 - RNA, 22 nt, synthetic construct
  source 1..22: mol_type = other RNA
tgtagagaccaggcttcaccat

SEQ ID NO: 15053 - RNA, 22 nt, synthetic construct
  source 1..22: mol_type = other RNA
tgtatcacagccaagcattcta

SEQ ID NO: 15054 - RNA, 22 nt, synthetic construct
  source 1..22: mol_type = other RNA
tgtcaataacgggtagttctta

SEQ ID NO: 15055 - RNA, 22 nt, synthetic construct
  source 1..22: mol_type = other RNA
tgtcccgaccctcccgtcgccg

SEQ ID NO: 15056 - RNA, 22 nt, synthetic construct
  source 1..22: mol_type = other RNA
tgtcctagcacctctgggtcta

SEQ ID NO: 15057 - RNA, 22 nt, synthetic construct
  source 1..22: mol_type = other RNA
tgtctgctgcggctctgcttcc

SEQ ID NO: 15058 - RNA, 22 nt, synthetic construct
  source 1..22: mol_type = other RNA
tgtgaacgcgtggaggggcgct

SEQ ID NO: 15059 - RNA, 22 nt, synthetic construct
  source 1..22: mol_type = other RNA
tgtgagaggcagaagataacca

SEQ ID NO: 15060 - RNA, 22 nt, synthetic construct
  source 1..22: mol_type = other RNA
tgtgatacaaagcggtttcgaa

SEQ ID NO: 15061 - RNA, 22 nt, synthetic construct
  source 1..22: mol_type = other RNA
tgtgatgggaacaaataagtta

SEQ ID NO: 15062 - RNA, 22 nt, synthetic construct
  source 1..22: mol_type = other RNA
tgtgccaaggactttatgtgct

SEQ ID NO: 15063 - RNA, 22 nt, synthetic construct
  source 1..22: mol_type = other RNA
tgtgcctcttactttcggtttt

SEQ ID NO: 15064 - RNA, 22 nt, synthetic construct
  source 1..22: mol_type = other RNA
tgtgctctctcgctccgtgact

SEQ ID NO: 15065 - RNA, 22 nt, synthetic construct
  source 1..22: mol_type = other RNA
tgtgctttgcgtcatttaattt

SEQ ID NO: 15066 - RNA, 22 nt, synthetic construct
  source 1..22: mol_type = other RNA
tgtggacttcgtctaggcgccc

SEQ ID NO: 15067 - RNA, 22 nt, synthetic construct
  source 1..22: mol_type = other RNA
tgtggccccacatagacccaga

SEQ ID NO: 15068 - RNA, 22 nt, synthetic construct
  source 1..22: mol_type = other RNA
tgtggccctcgctgtgctctct

SEQ ID NO: 15069 - RNA, 22 nt, synthetic construct
  source 1..22: mol_type = other RNA
tgtggggccacaccgtggggag

SEQ ID NO: 15070 - RNA, 22 nt, synthetic construct
  source 1..22: mol_type = other RNA
tgtggtcccagctgctccggtg

SEQ ID NO: 15071 - RNA, 22 nt, synthetic construct
  source 1..22: mol_type = other RNA
tgtggtcttttcgtacagaggg

SEQ ID NO: 15072 - RNA, 22 nt, synthetic construct
  source 1..22: mol_type = other RNA
tgtggtggctcgtgcctgtggt

SEQ ID NO: 15073 - RNA, 22 nt, synthetic construct
  source 1..22: mol_type = other RNA
tgtgtgccaaggactttatgtg

SEQ ID NO: 15074 - RNA, 22 nt, synthetic construct
  source 1..22: mol_type = other RNA
tgttcccatcacatgtcacttt

SEQ ID NO: 15075 - RNA, 22 nt, synthetic construct
  source 1..22: mol_type = other RNA
tgttgcccacgctggagtgcac

SEQ ID NO: 15076 - RNA, 22 nt, synthetic construct
  source 1..22: mol_type = other RNA
tgttggccaggctggtctcaac

SEQ ID NO: 15077 - RNA, 22 nt, synthetic construct
  source 1..22: mol_type = other RNA
tgtttccaagatgtactgtgcc

SEQ ID NO: 15078 - RNA, 22 nt, synthetic construct
  source 1..22: mol_type = other RNA
tgtttcctccccacggtgtggc

SEQ ID NO: 15079 - RNA, 22 nt, synthetic construct
  source 1..22: mol_type = other RNA
tgttttcaaaaccgaaagtaag

SEQ ID NO: 15080 - RNA, 22 nt, synthetic construct
  source 1..22: mol_type = other RNA
tgttttcaaaattaaatgacgc

SEQ ID NO: 15081 - RNA, 22 nt, synthetic construct
  source 1..22: mol_type = other RNA
ttaaaagtgacatgtgatggga

SEQ ID NO: 15082 - RNA, 22 nt, synthetic construct
  source 1..22: mol_type = other RNA
ttaaaatctcggtgccttagtt

SEQ ID NO: 15083 - RNA, 22 nt, synthetic construct
  source 1..22: mol_type = other RNA
ttaaatgacgcaaagcacataa

SEQ ID NO: 15084 - RNA, 22 nt, synthetic construct
  source 1..22: mol_type = other RNA
ttaacttatttgttcccatcac

SEQ ID NO: 15085 - RNA, 22 nt, synthetic construct
  source 1..22: mol_type = other RNA
ttaagaaaaacgcctgccttct

SEQ ID NO: 15086 - RNA, 22 nt, synthetic construct
  source 1..22: mol_type = other RNA
ttaagaaacttaattacacagg

SEQ ID NO: 15087 - RNA, 22 nt, synthetic construct
  source 1..22: mol_type = other RNA
ttaagtttcttaaaatctcggt

SEQ ID NO: 15088 - RNA, 22 nt, synthetic construct
  source 1..22: mol_type = other RNA
ttaattacacaggggataaatg

SEQ ID NO: 15089 - RNA, 22 nt, synthetic construct
  source 1..22: mol_type = other RNA
ttaattattcgaaaccgctttg

SEQ ID NO: 15090 - RNA, 22 nt, synthetic construct
  source 1..22: mol_type = other RNA
ttacacaggggataaatggcag

SEQ ID NO: 15091 - RNA, 22 nt, synthetic construct
  source 1..22: mol_type = other RNA
ttacagccaaaaggcatgcgct

SEQ ID NO: 15092 - RNA, 22 nt, synthetic construct
  source 1..22: mol_type = other RNA
ttacaggcgtaagctaccacgc

SEQ ID NO: 15093 - RNA, 22 nt, synthetic construct
  source 1..22: mol_type = other RNA
ttacccgggcgacgcctccccc

SEQ ID NO: 15094 - RNA, 22 nt, synthetic construct
  source 1..22: mol_type = other RNA
ttactttcggttttgaaaacat

SEQ ID NO: 15095 - RNA, 22 nt, synthetic construct
  source 1..22: mol_type = other RNA
ttagactggagagctgtggact

SEQ ID NO: 15096 - RNA, 22 nt, synthetic construct
  source 1..22: mol_type = other RNA
ttagccgggtgtggtggctcgt

SEQ ID NO: 15097 - RNA, 22 nt, synthetic construct
  source 1..22: mol_type = other RNA
ttagcgggcgcctagacgaagt

SEQ ID NO: 15098 - RNA, 22 nt, synthetic construct
  source 1..22: mol_type = other RNA
ttaggcttgacttcaatctcga

SEQ ID NO: 15099 - RNA, 22 nt, synthetic construct
  source 1..22: mol_type = other RNA
ttaggcttttgagctatcatgg

SEQ ID NO: 15100 - RNA, 22 nt, synthetic construct
  source 1..22: mol_type = other RNA
ttagggaggccgaggcgggagg

SEQ ID NO: 15101 - RNA, 22 nt, synthetic construct
  source 1..22: mol_type = other RNA
ttagggcgtcgataagcgtcag

SEQ ID NO: 15102 - RNA, 22 nt, synthetic construct
  source 1..22: mol_type = other RNA
ttagtttcttcatctgtgagag

SEQ ID NO: 15103 - RNA, 22 nt, synthetic construct
  source 1..22: mol_type = other RNA
ttataagaactacccgttattg

SEQ ID NO: 15104 - RNA, 22 nt, synthetic construct
  source 1..22: mol_type = other RNA
ttatcccctgtgtaattaagtt

SEQ ID NO: 15105 - RNA, 22 nt, synthetic construct
  source 1..22: mol_type = other RNA
ttatcgacgccctaaactttgt

SEQ ID NO: 15106 - RNA, 22 nt, synthetic construct
  source 1..22: mol_type = other RNA
ttatctatggcggaagataact

SEQ ID NO: 15107 - RNA, 22 nt, synthetic construct
  source 1..22: mol_type = other RNA
ttatcttccgccatagataact

SEQ ID NO: 15108 - RNA, 22 nt, synthetic construct
  source 1..22: mol_type = other RNA
ttatcttctgcctctcacagat

SEQ ID NO: 15109 - RNA, 22 nt, synthetic construct
  source 1..22: mol_type = other RNA
ttatgtgctttgcgtcatttaa

SEQ ID NO: 15110 - RNA, 22 nt, synthetic construct
  source 1..22: mol_type = other RNA
ttattcgaaaccgctttgtatc

SEQ ID NO: 15111 - RNA, 22 nt, synthetic construct
  source 1..22: mol_type = other RNA
ttattgacatctttctgtgtgc

SEQ ID NO: 15112 - RNA, 22 nt, synthetic construct
  source 1..22: mol_type = other RNA
ttatttgttcccatcacatgtc

SEQ ID NO: 15113 - RNA, 22 nt, synthetic construct
  source 1..22: mol_type = other RNA
ttattttttgtagagaccaggc

SEQ ID NO: 15114 - RNA, 22 nt, synthetic construct
  source 1..22: mol_type = other RNA
ttcaaaaccgaaagtaagaggc

SEQ ID NO: 15115 - RNA, 22 nt, synthetic construct
  source 1..22: mol_type = other RNA
ttcaaaattaaatgacgcaaag

SEQ ID NO: 15116 - RNA, 22 nt, synthetic construct
  source 1..22: mol_type = other RNA
ttcaatctcgattgctgccatt

SEQ ID NO: 15117 - RNA, 22 nt, synthetic construct
  source 1..22: mol_type = other RNA
ttcacaaacctcagcgccgcgc

SEQ ID NO: 15118 - RNA, 22 nt, synthetic construct
  source 1..22: mol_type = other RNA
ttcatctgtgagaggcagaaga

SEQ ID NO: 15119 - RNA, 22 nt, synthetic construct
  source 1..22: mol_type = other RNA
ttccaagatgtactgtgcctct

SEQ ID NO: 15120 - RNA, 22 nt, synthetic construct
  source 1..22: mol_type = other RNA
ttcccatcacatgtcactttta

SEQ ID NO: 15121 - RNA, 22 nt, synthetic construct
  source 1..22: mol_type = other RNA
ttccccactcccaggccacccc

SEQ ID NO: 15122 - RNA, 22 nt, synthetic construct
  source 1..22: mol_type = other RNA
ttccccgagatccagccctgga

SEQ ID NO: 15123 - RNA, 22 nt, synthetic construct
  source 1..22: mol_type = other RNA
ttcccttagactggagagctgt

SEQ ID NO: 15124 - RNA, 22 nt, synthetic construct
  source 1..22: mol_type = other RNA
ttcccttctccaagttctcctt

SEQ ID NO: 15125 - RNA, 22 nt, synthetic construct
  source 1..22: mol_type = other RNA
ttccgccatagataactactat

SEQ ID NO: 15126 - RNA, 22 nt, synthetic construct
  source 1..22: mol_type = other RNA
ttccgctctttcgcggggcctc

SEQ ID NO: 15127 - RNA, 22 nt, synthetic construct
  source 1..22: mol_type = other RNA
ttcctccccacggtgtggcccc

SEQ ID NO: 15128 - RNA, 22 nt, synthetic construct
  source 1..22: mol_type = other RNA
ttcctctcccgctctgcaccct

SEQ ID NO: 15129 - RNA, 22 nt, synthetic construct
  source 1..22: mol_type = other RNA
ttcctctttggctctttgcctg

SEQ ID NO: 15130 - RNA, 22 nt, synthetic construct
  source 1..22: mol_type = other RNA
ttcgaaaccgctttgtatcaca

SEQ ID NO: 15131 - RNA, 22 nt, synthetic construct
  source 1..22: mol_type = other RNA
ttcgcatgtcctagcacctctg

SEQ ID NO: 15132 - RNA, 22 nt, synthetic construct
  source 1..22: mol_type = other RNA
ttcgcggggcctctggctcccc

SEQ ID NO: 15133 - RNA, 22 nt, synthetic construct
  source 1..22: mol_type = other RNA
ttcggcggggagcaggggagac

SEQ ID NO: 15134 - RNA, 22 nt, synthetic construct
  source 1..22: mol_type = other RNA
ttcggttttgaaaacatgaggg

SEQ ID NO: 15135 - RNA, 22 nt, synthetic construct
  source 1..22: mol_type = other RNA
ttcgtacagagggcttcctctt

SEQ ID NO: 15136 - RNA, 22 nt, synthetic construct
  source 1..22: mol_type = other RNA
ttcgtctaggcgcccgctaagt

SEQ ID NO: 15137 - RNA, 22 nt, synthetic construct
  source 1..22: mol_type = other RNA
ttctacaaacgtcgcgtgctgt

SEQ ID NO: 15138 - RNA, 22 nt, synthetic construct
  source 1..22: mol_type = other RNA
ttctccaagttctccttggtgg

SEQ ID NO: 15139 - RNA, 22 nt, synthetic construct
  source 1..22: mol_type = other RNA
ttctccagagcaaactgggcgg

SEQ ID NO: 15140 - RNA, 22 nt, synthetic construct
  source 1..22: mol_type = other RNA
ttctccttggtggcccgccgtg

SEQ ID NO: 15141 - RNA, 22 nt, synthetic construct
  source 1..22: mol_type = other RNA
ttctcttccgctctttcgcggg

SEQ ID NO: 15142 - RNA, 22 nt, synthetic construct
  source 1..22: mol_type = other RNA
ttctgcctctcacagatgaaga

SEQ ID NO: 15143 - RNA, 22 nt, synthetic construct
  source 1..22: mol_type = other RNA
ttctgcgtgagattctccagag

SEQ ID NO: 15144 - RNA, 22 nt, synthetic construct
  source 1..22: mol_type = other RNA
ttctgtgtgccaaggactttat

SEQ ID NO: 15145 - RNA, 22 nt, synthetic construct
  source 1..22: mol_type = other RNA
ttcttaaaatctcggtgcctta

SEQ ID NO: 15146 - RNA, 22 nt, synthetic construct
  source 1..22: mol_type = other RNA
ttcttcatctgtgagaggcaga

SEQ ID NO: 15147 - RNA, 22 nt, synthetic construct
  source 1..22: mol_type = other RNA
ttgaaaacagttatcttccgcc

SEQ ID NO: 15148 - RNA, 22 nt, synthetic construct
  source 1..22: mol_type = other RNA
ttgaaaacatgagggggttggg

SEQ ID NO: 15149 - RNA, 22 nt, synthetic construct
  source 1..22: mol_type = other RNA
ttgaagtcaagcctaaccaggg

SEQ ID NO: 15150 - RNA, 22 nt, synthetic construct
  source 1..22: mol_type = other RNA
ttgacatctttctgtgtgccaa

SEQ ID NO: 15151 - RNA, 22 nt, synthetic construct
  source 1..22: mol_type = other RNA
ttgacttcaatctcgattgctg

SEQ ID NO: 15152 - RNA, 22 nt, synthetic construct
  source 1..22: mol_type = other RNA
ttgagctatcatggcgccagtg

SEQ ID NO: 15153 - RNA, 22 nt, synthetic construct
  source 1..22: mol_type = other RNA
ttgagcttaggcttttgagcta

SEQ ID NO: 15154 - RNA, 22 nt, synthetic construct
  source 1..22: mol_type = other RNA
ttgaggtccgtagttgagacca

SEQ ID NO: 15155 - RNA, 22 nt, synthetic construct
  source 1..22: mol_type = other RNA
ttgcccacgctggagtgcactg

SEQ ID NO: 15156 - RNA, 22 nt, synthetic construct
  source 1..22: mol_type = other RNA
ttgcccctttcggcggggagca

SEQ ID NO: 15157 - RNA, 22 nt, synthetic construct
  source 1..22: mol_type = other RNA
ttgcctggttgtttccaagatg

SEQ ID NO: 15158 - RNA, 22 nt, synthetic construct
  source 1..22: mol_type = other RNA
ttgcgggagcgcatgccttttg

SEQ ID NO: 15159 - RNA, 22 nt, synthetic construct
  source 1..22: mol_type = other RNA
ttgctctggagaatctcacgca

SEQ ID NO: 15160 - RNA, 22 nt, synthetic construct
  source 1..22: mol_type = other RNA
ttgctgccatttatcccctgtg

SEQ ID NO: 15161 - RNA, 22 nt, synthetic construct
  source 1..22: mol_type = other RNA
ttggaaacaaccaggcaaagag

SEQ ID NO: 15162 - RNA, 22 nt, synthetic construct
  source 1..22: mol_type = other RNA
ttggagaagggaagtcacggag

SEQ ID NO: 15163 - RNA, 22 nt, synthetic construct
  source 1..22: mol_type = other RNA
ttggcacacagaaagatgtcaa

SEQ ID NO: 15164 - RNA, 22 nt, synthetic construct
  source 1..22: mol_type = other RNA
ttggccaggctggtctcaacta

SEQ ID NO: 15165 - RNA, 22 nt, synthetic construct
  source 1..22: mol_type = other RNA
ttggcctacggcgacgggaggg

SEQ ID NO: 15166 - RNA, 22 nt, synthetic construct
  source 1..22: mol_type = other RNA
ttggctctttgcctggttgttt

SEQ ID NO: 15167 - RNA, 22 nt, synthetic construct
  source 1..22: mol_type = other RNA
ttggctgtaattcgtgcatttt

SEQ ID NO: 15168 - RNA, 22 nt, synthetic construct
  source 1..22: mol_type = other RNA
ttggctgtgatacaaagcggtt

SEQ ID NO: 15169 - RNA, 22 nt, synthetic construct
  source 1..22: mol_type = other RNA
ttgggacgagcctacccgtccc

SEQ ID NO: 15170 - RNA, 22 nt, synthetic construct
  source 1..22: mol_type = other RNA
ttgggcgtggtagcttacgcct

SEQ ID NO: 15171 - RNA, 22 nt, synthetic construct
  source 1..22: mol_type = other RNA
ttgggggagggtttctcttccg

SEQ ID NO: 15172 - RNA, 22 nt, synthetic construct
  source 1..22: mol_type = other RNA
ttggggtctgggggaggcgtcg

SEQ ID NO: 15173 - RNA, 22 nt, synthetic construct
  source 1..22: mol_type = other RNA
ttggtggcccgccgtggggcta

SEQ ID NO: 15174 - RNA, 22 nt, synthetic construct
  source 1..22: mol_type = other RNA
ttgtagaatgcttggctgtgat

SEQ ID NO: 15175 - RNA, 22 nt, synthetic construct
  source 1..22: mol_type = other RNA
ttgtagagaccaggcttcacca

SEQ ID NO: 15176 - RNA, 22 nt, synthetic construct
  source 1..22: mol_type = other RNA
ttgtatcacagccaagcattct

SEQ ID NO: 15177 - RNA, 22 nt, synthetic construct
  source 1..22: mol_type = other RNA
ttgtcccgaccctcccgtcgcc

SEQ ID NO: 15178 - RNA, 22 nt, synthetic construct
  source 1..22: mol_type = other RNA
ttgtgaacgcgtggaggggcgc

SEQ ID NO: 15179 - RNA, 22 nt, synthetic construct
  source 1..22: mol_type = other RNA
ttgttcccatcacatgtcactt

SEQ ID NO: 15180 - RNA, 22 nt, synthetic construct
  source 1..22: mol_type = other RNA
ttgtttccaagatgtactgtgc

SEQ ID NO: 15181 - RNA, 22 nt, synthetic construct
  source 1..22: mol_type = other RNA
tttaaaagtgacatgtgatggg

SEQ ID NO: 15182 - RNA, 22 nt, synthetic construct
  source 1..22: mol_type = other RNA
tttaagaaaaacgcctgccttc

SEQ ID NO: 15183 - RNA, 22 nt, synthetic construct
  source 1..22: mol_type = other RNA
tttagggcgtcgataagcgtca

SEQ ID NO: 15184 - RNA, 22 nt, synthetic construct
  source 1..22: mol_type = other RNA
tttatcccctgtgtaattaagt

SEQ ID NO: 15185 - RNA, 22 nt, synthetic construct
  source 1..22: mol_type = other RNA
tttatgtgctttgcgtcattta

SEQ ID NO: 15186 - RNA, 22 nt, synthetic construct
  source 1..22: mol_type = other RNA
tttcaaaaccgaaagtaagagg

SEQ ID NO: 15187 - RNA, 22 nt, synthetic construct
  source 1..22: mol_type = other RNA
tttccaagatgtactgtgcctc

SEQ ID NO: 15188 - RNA, 22 nt, synthetic construct
  source 1..22: mol_type = other RNA
tttcctccccacggtgtggccc

SEQ ID NO: 15189 - RNA, 22 nt, synthetic construct
  source 1..22: mol_type = other RNA
tttcgcggggcctctggctccc

SEQ ID NO: 15190 - RNA, 22 nt, synthetic construct
  source 1..22: mol_type = other RNA
tttcggcggggagcaggggaga

SEQ ID NO: 15191 - RNA, 22 nt, synthetic construct
  source 1..22: mol_type = other RNA
tttcggttttgaaaacatgagg

SEQ ID NO: 15192 - RNA, 22 nt, synthetic construct
  source 1..22: mol_type = other RNA
tttcgtacagagggcttcctct

SEQ ID NO: 15193 - RNA, 22 nt, synthetic construct
  source 1..22: mol_type = other RNA
tttctcttccgctctttcgcgg

SEQ ID NO: 15194 - RNA, 22 nt, synthetic construct
  source 1..22: mol_type = other RNA
tttctgtgtgccaaggacttta

SEQ ID NO: 15195 - RNA, 22 nt, synthetic construct
  source 1..22: mol_type = other RNA
tttcttaaaatctcggtgcctt

SEQ ID NO: 15196 - RNA, 22 nt, synthetic construct
  source 1..22: mol_type = other RNA
tttcttcatctgtgagaggcag

SEQ ID NO: 15197 - RNA, 22 nt, synthetic construct
  source 1..22: mol_type = other RNA
tttgaaaacagttatcttccgc

SEQ ID NO: 15198 - RNA, 22 nt, synthetic construct
  source 1..22: mol_type = other RNA
tttgaaaacatgagggggttgg

SEQ ID NO: 15199 - RNA, 22 nt, synthetic construct
  source 1..22: mol_type = other RNA
tttgagctatcatggcgccagt

SEQ ID NO: 15200 - RNA, 22 nt, synthetic construct
  source 1..22: mol_type = other RNA
tttgcctggttgtttccaagat

SEQ ID NO: 15201 - RNA, 22 nt, synthetic construct
  source 1..22: mol_type = other RNA
tttgcgggagcgcatgcctttt

SEQ ID NO: 15202 - RNA, 22 nt, synthetic construct
  source 1..22: mol_type = other RNA
tttgctctggagaatctcacgc

SEQ ID NO: 15203 - RNA, 22 nt, synthetic construct
  source 1..22: mol_type = other RNA
tttggcctacggcgacgggagg

SEQ ID NO: 15204 - RNA, 22 nt, synthetic construct
  source 1..22: mol_type = other RNA
tttggctctttgcctggttgtt

SEQ ID NO: 15205 - RNA, 22 nt, synthetic construct
  source 1..22: mol_type = other RNA
tttggctgtaattcgtgcattt

SEQ ID NO: 15206 - RNA, 22 nt, synthetic construct
  source 1..22: mol_type = other RNA
tttgggacgagcctacccgtcc

SEQ ID NO: 15207 - RNA, 22 nt, synthetic construct
  source 1..22: mol_type = other RNA
tttgtagaatgcttggctgtga

SEQ ID NO: 15208 - RNA, 22 nt, synthetic construct
  source 1..22: mol_type = other RNA
tttgtagagaccaggcttcacc

SEQ ID NO: 15209 - RNA, 22 nt, synthetic construct
  source 1..22: mol_type = other RNA
tttgtatcacagccaagcattc

SEQ ID NO: 15210 - RNA, 22 nt, synthetic construct
  source 1..22: mol_type = other RNA
tttgtcccgaccctcccgtcgc

SEQ ID NO: 15211 - RNA, 22 nt, synthetic construct
  source 1..22: mol_type = other RNA
tttgtgaacgcgtggaggggcg

SEQ ID NO: 15212 - RNA, 22 nt, synthetic construct
  source 1..22: mol_type = other RNA
tttgttcccatcacatgtcact

SEQ ID NO: 15213 - RNA, 22 nt, synthetic construct
  source 1..22: mol_type = other RNA
ttttaaaagtgacatgtgatgg

SEQ ID NO: 15214 - RNA, 22 nt, synthetic construct
  source 1..22: mol_type = other RNA
ttttaagaaaaacgcctgcctt

SEQ ID NO: 15215 - RNA, 22 nt, synthetic construct
  source 1..22: mol_type = other RNA
ttttcaaaaccgaaagtaagag

SEQ ID NO: 15216 - RNA, 22 nt, synthetic construct
  source 1..22: mol_type = other RNA
ttttcgtacagagggcttcctc

SEQ ID NO: 15217 - RNA, 22 nt, synthetic construct
  source 1..22: mol_type = other RNA
ttttgaaaacagttatcttccg

SEQ ID NO: 15218 - RNA, 22 nt, synthetic construct
  source 1..22: mol_type = other RNA
ttttgaaaacatgagggggttg

SEQ ID NO: 15219 - RNA, 22 nt, synthetic construct
  source 1..22: mol_type = other RNA
ttttgagctatcatggcgccag

SEQ ID NO: 15220 - RNA, 22 nt, synthetic construct
  source 1..22: mol_type = other RNA
ttttgcgggagcgcatgccttt

SEQ ID NO: 15221 - RNA, 22 nt, synthetic construct
  source 1..22: mol_type = other RNA
ttttggctgtaattcgtgcatt

SEQ ID NO: 15222 - RNA, 22 nt, synthetic construct
  source 1..22: mol_type = other RNA
ttttgtagagaccaggcttcac

SEQ ID NO: 15223 - RNA, 22 nt, synthetic construct
  source 1..22: mol_type = other RNA
tttttaaaagtgacatgtgatg

SEQ ID NO: 15224 - RNA, 22 nt, synthetic construct
  source 1..22: mol_type = other RNA
tttttaagaaaaacgcctgcct

SEQ ID NO: 15225 - RNA, 22 nt, synthetic construct
  source 1..22: mol_type = other RNA
tttttgtagagaccaggcttca

SEQ ID NO: 15226 - RNA, 22 nt, synthetic construct
  source 1..22: mol_type = other RNA
ttttttaagaaaaacgcctgcc

SEQ ID NO: 15227 - RNA, 22 nt, synthetic construct
  source 1..22: mol_type = other RNA
ttttttgtagagaccaggcttc

SEQ ID NO: 15228 - RNA, 20 nt, synthetic construct
  source 1..20: mol_type = other RNA
aaaagaaagaaagaagtgaa

SEQ ID NO: 15229 - RNA, 20 nt, synthetic construct
  source 1..20: mol_type = other RNA
aaaccttcacttctttcttt

SEQ ID NO: 15230 - RNA, 20 nt, synthetic construct
  source 1..20: mol_type = other RNA
aaagaaaagaaagaaagaag

SEQ ID NO: 15231 - RNA, 20 nt, synthetic construct
  source 1..20: mol_type = other RNA
aaagaaagaaagaagtgaag

SEQ ID NO: 15232 - RNA, 20 nt, synthetic construct
  source 1..20: mol_type = other RNA
aaagaaagaagtgaaggttt

SEQ ID NO: 15233 - RNA, 20 nt, synthetic construct
  source 1..20: mol_type = other RNA
aaagaagtgaaggtttgtca

SEQ ID NO: 15234 - RNA, 20 nt, synthetic construct
  source 1..20: mol_type = other RNA
aaccttcacttctttctttc

SEQ ID NO: 15235 - RNA, 20 nt, synthetic construct
  source 1..20: mol_type = other RNA
aagaaaagaaagaaagaagt

SEQ ID NO: 15236 - RNA, 20 nt, synthetic construct
  source 1..20: mol_type = other RNA
aagaaagaaagaagtgaagg

SEQ ID NO: 15237 - RNA, 20 nt, synthetic construct
  source 1..20: mol_type = other RNA
aagaaagaagtgaaggtttg

SEQ ID NO: 15238 - RNA, 20 nt, synthetic construct
  source 1..20: mol_type = other RNA
aagaagtgaaggtttgtcag

SEQ ID NO: 15239 - RNA, 20 nt, synthetic construct
  source 1..20: mol_type = other RNA
aagagaaaagaaaagaaaga

SEQ ID NO: 15240 - RNA, 20 nt, synthetic construct
  source 1..20: mol_type = other RNA
acaaaccttcacttctttct

SEQ ID NO: 15241 - RNA, 20 nt, synthetic construct
  source 1..20: mol_type = other RNA
accttcacttctttctttct

SEQ ID NO: 15242 - RNA, 20 nt, synthetic construct
  source 1..20: mol_type = other RNA
actgacaaaccttcacttct

SEQ ID NO: 15243 - RNA, 20 nt, synthetic construct
  source 1..20: mol_type = other RNA
agaaaagaaaagaaagaaag

SEQ ID NO: 15244 - RNA, 20 nt, synthetic construct
  source 1..20: mol_type = other RNA
agaaaagaaagaaagaagtg

SEQ ID NO: 15245 - RNA, 20 nt, synthetic construct
  source 1..20: mol_type = other RNA
agaaagaaagaagtgaaggt

SEQ ID NO: 15246 - RNA, 20 nt, synthetic construct
  source 1..20: mol_type = other RNA
agaaagaagtgaaggtttgt

SEQ ID NO: 15247 - RNA, 20 nt, synthetic construct
  source 1..20: mol_type = other RNA
agaagtgaaggtttgtcagt

SEQ ID NO: 15248 - RNA, 20 nt, synthetic construct
  source 1..20: mol_type = other RNA
agagaaaagaaaagaaagaa

SEQ ID NO: 15249 - RNA, 20 nt, synthetic construct
  source 1..20: mol_type = other RNA
caaaccttcacttctttctt

SEQ ID NO: 15250 - RNA, 20 nt, synthetic construct
  source 1..20: mol_type = other RNA
cacttctttctttcttttct

SEQ ID NO: 15251 - RNA, 20 nt, synthetic construct
  source 1..20: mol_type = other RNA
cccctgactgacaaaccttc

SEQ ID NO: 15252 - RNA, 20 nt, synthetic construct
  source 1..20: mol_type = other RNA
ccctgactgacaaaccttca

SEQ ID NO: 15253 - RNA, 20 nt, synthetic construct
  source 1..20: mol_type = other RNA
cctgactgacaaaccttcac

SEQ ID NO: 15254 - RNA, 20 nt, synthetic construct
  source 1..20: mol_type = other RNA
ccttcacttctttctttctt

SEQ ID NO: 15255 - RNA, 20 nt, synthetic construct
  source 1..20: mol_type = other RNA
ctcccctgactgacaaacct

SEQ ID NO: 15256 - RNA, 20 nt, synthetic construct
  source 1..20: mol_type = other RNA
ctgacaaaccttcacttctt

SEQ ID NO: 15257 - RNA, 20 nt, synthetic construct
  source 1..20: mol_type = other RNA
ctgactgacaaaccttcact

SEQ ID NO: 15258 - RNA, 20 nt, synthetic construct
  source 1..20: mol_type = other RNA
cttcacttctttctttcttt

SEQ ID NO: 15259 - RNA, 20 nt, synthetic construct
  source 1..20: mol_type = other RNA
gaaaagaaaagaaagaaaga

SEQ ID NO: 15260 - RNA, 20 nt, synthetic construct
  source 1..20: mol_type = other RNA
gaaaagaaagaaagaagtga

SEQ ID NO: 15261 - RNA, 20 nt, synthetic construct
  source 1..20: mol_type = other RNA
gaaagaaagaagtgaaggtt

SEQ ID NO: 15262 - RNA, 20 nt, synthetic construct
  source 1..20: mol_type = other RNA
gaaagaagtgaaggtttgtc

SEQ ID NO: 15263 - RNA, 20 nt, synthetic construct
  source 1..20: mol_type = other RNA
gacaaaccttcacttctttc

SEQ ID NO: 15264 - RNA, 20 nt, synthetic construct
  source 1..20: mol_type = other RNA
gactgacaaaccttcacttc

SEQ ID NO: 15265 - RNA, 20 nt, synthetic construct
  source 1..20: mol_type = other RNA
gagaaaagaaaagaaagaaa

SEQ ID NO: 15266 - RNA, 20 nt, synthetic construct
  source 1..20: mol_type = other RNA
tcacttctttctttcttttc

SEQ ID NO: 15267 - RNA, 20 nt, synthetic construct
  source 1..20: mol_type = other RNA
tcccctgactgacaaacctt

SEQ ID NO: 15268 - RNA, 20 nt, synthetic construct
  source 1..20: mol_type = other RNA
tgacaaaccttcacttcttt

SEQ ID NO: 15269 - RNA, 20 nt, synthetic construct
  source 1..20: mol_type = other RNA
tgactgacaaaccttcactt

SEQ ID NO: 15270 - RNA, 20 nt, synthetic construct
  source 1..20: mol_type = other RNA
ttcacttctttctttctttt

SEQ ID NO: 15271 - RNA, 20 nt, synthetic construct
  source 1..20: mol_type = other RNA
ttctttcttttcttttctct

SEQ ID NO: 15272 - RNA, 21 nt, synthetic construct
  source 1..21: mol_type = other RNA
aaaagaaagaaagaagtgaag

SEQ ID NO: 15273 - RNA, 21 nt, synthetic construct
  source 1..21: mol_type = other RNA
aaaccttcacttctttctttc

SEQ ID NO: 15274 - RNA, 21 nt, synthetic construct
  source 1..21: mol_type = other RNA
aaagaaagaaagaagtgaagg

SEQ ID NO: 15275 - RNA, 21 nt, synthetic construct
  source 1..21: mol_type = other RNA
aaagaaagaagtgaaggtttg

SEQ ID NO: 15276 - RNA, 21 nt, synthetic construct
  source 1..21: mol_type = other RNA
aaagaagtgaaggtttgtcag

SEQ ID NO: 15277 - RNA, 21 nt, synthetic construct
  source 1..21: mol_type = other RNA
aaccttcacttctttctttct

SEQ ID NO: 15278 - RNA, 21 nt, synthetic construct
  source 1..21: mol_type = other RNA
aagaaaagaaagaaagaagtg

SEQ ID NO: 15279 - RNA, 21 nt, synthetic construct
  source 1..21: mol_type = other RNA
aagaaagaaagaagtgaaggt

SEQ ID NO: 15280 - RNA, 21 nt, synthetic construct
  source 1..21: mol_type = other RNA
aagaaagaagtgaaggtttgt

SEQ ID NO: 15281 - RNA, 21 nt, synthetic construct
  source 1..21: mol_type = other RNA
aagaagtgaaggtttgtcagt

SEQ ID NO: 15282 - RNA, 21 nt, synthetic construct
  source 1..21: mol_type = other RNA
acaaaccttcacttctttctt

SEQ ID NO: 15283 - RNA, 21 nt, synthetic construct
  source 1..21: mol_type = other RNA
accttcacttctttctttctt

SEQ ID NO: 15284 - RNA, 21 nt, synthetic construct
  source 1..21: mol_type = other RNA
actgacaaaccttcacttctt

SEQ ID NO: 15285 - RNA, 21 nt, synthetic construct
  source 1..21: mol_type = other RNA
agaaaagaaagaaagaagtga

SEQ ID NO: 15286 - RNA, 21 nt, synthetic construct
  source 1..21: mol_type = other RNA
agaaagaaagaagtgaaggtt

SEQ ID NO: 15287 - RNA, 21 nt, synthetic construct
  source 1..21: mol_type = other RNA
agaaagaagtgaaggtttgtc

SEQ ID NO: 15288 - RNA, 21 nt, synthetic construct
  source 1..21: mol_type = other RNA
caaaccttcacttctttcttt

SEQ ID NO: 15289 - RNA, 21 nt, synthetic construct
  source 1..21: mol_type = other RNA
cacttctttctttcttttctt

SEQ ID NO: 15290 - RNA, 21 nt, synthetic construct
  source 1..21: mol_type = other RNA
cccctgactgacaaaccttca

SEQ ID NO: 15291 - RNA, 21 nt, synthetic construct
  source 1..21: mol_type = other RNA
ccctgactgacaaaccttcac

SEQ ID NO: 15292 - RNA, 21 nt, synthetic construct
  source 1..21: mol_type = other RNA
cctgactgacaaaccttcact

SEQ ID NO: 15293 - RNA, 21 nt, synthetic construct
  source 1..21: mol_type = other RNA
ccttcacttctttctttcttt

SEQ ID NO: 15294 - RNA, 21 nt, synthetic construct
  source 1..21: mol_type = other RNA
ctcccctgactgacaaacctt

SEQ ID NO: 15295 - RNA, 21 nt, synthetic construct
  source 1..21: mol_type = other RNA
ctgacaaaccttcacttcttt

SEQ ID NO: 15296 - RNA, 21 nt, synthetic construct
  source 1..21: mol_type = other RNA
ctgactgacaaaccttcactt

SEQ ID NO: 15297 - RNA, 21 nt, synthetic construct
  source 1..21: mol_type = other RNA
cttcacttctttctttctttt

SEQ ID NO: 15298 - RNA, 21 nt, synthetic construct
  source 1..21: mol_type = other RNA
gaaaagaaagaaagaagtgaa

SEQ ID NO: 15299 - RNA, 21 nt, synthetic construct
  source 1..21: mol_type = other RNA
gaaagaaagaagtgaaggttt

SEQ ID NO: 15300 - RNA, 21 nt, synthetic construct
  source 1..21: mol_type = other RNA
gaaagaagtgaaggtttgtca

SEQ ID NO: 15301 - RNA, 21 nt, synthetic construct
  source 1..21: mol_type = other RNA
gaaagagaaaagaaaagaaag

SEQ ID NO: 15302 - RNA, 21 nt, synthetic construct
  source 1..21: mol_type = other RNA
gacaaaccttcacttctttct

SEQ ID NO: 15303 - RNA, 21 nt, synthetic construct
  source 1..21: mol_type = other RNA
gactgacaaaccttcacttct

SEQ ID NO: 15304 - RNA, 21 nt, synthetic construct
  source 1..21: mol_type = other RNA
gagaaaagaaaagaaagaaag

SEQ ID NO: 15305 - RNA, 21 nt, synthetic construct
  source 1..21: mol_type = other RNA
tcacttctttctttcttttct

SEQ ID NO: 15306 - RNA, 21 nt, synthetic construct
  source 1..21: mol_type = other RNA
tcccctgactgacaaaccttc

SEQ ID NO: 15307 - RNA, 21 nt, synthetic construct
  source 1..21: mol_type = other RNA
tgacaaaccttcacttctttc

SEQ ID NO: 15308 - RNA, 21 nt, synthetic construct
  source 1..21: mol_type = other RNA
tgactgacaaaccttcacttc

SEQ ID NO: 15309 - RNA, 21 nt, synthetic construct
  source 1..21: mol_type = other RNA
ttcacttctttctttcttttc

SEQ ID NO: 15310 - RNA, 22 nt, synthetic construct
  source 1..22: mol_type = other RNA
aaaagaaagaaagaagtgaagg

SEQ ID NO: 15311 - RNA, 22 nt, synthetic construct
  source 1..22: mol_type = other RNA
aaaccttcacttctttctttct

SEQ ID NO: 15312 - RNA, 22 nt, synthetic construct
  source 1..22: mol_type = other RNA
aaagaaaagaaagaaagaagtg

SEQ ID NO: 15313 - RNA, 22 nt, synthetic construct
  source 1..22: mol_type = other RNA
aaagaaagaaagaagtgaaggt

SEQ ID NO: 15314 - RNA, 22 nt, synthetic construct
  source 1..22: mol_type = other RNA
aaagaaagaagtgaaggtttgt

SEQ ID NO: 15315 - RNA, 22 nt, synthetic construct
  source 1..22: mol_type = other RNA
aaagaagtgaaggtttgtcagt

SEQ ID NO: 15316 - RNA, 22 nt, synthetic construct
  source 1..22: mol_type = other RNA
aaccttcacttctttctttctt

SEQ ID NO: 15317 - RNA, 22 nt, synthetic construct
  source 1..22: mol_type = other RNA
aagaaaagaaagaaagaagtga

SEQ ID NO: 15318 - RNA, 22 nt, synthetic construct
  source 1..22: mol_type = other RNA
aagaaagaaagaagtgaaggtt

SEQ ID NO: 15319 - RNA, 22 nt, synthetic construct
  source 1..22: mol_type = other RNA
aagaaagaagtgaaggtttgtc

SEQ ID NO: 15320 - RNA, 22 nt, synthetic construct
  source 1..22: mol_type = other RNA
acaaaccttcacttctttcttt

SEQ ID NO: 15321 - RNA, 22 nt, synthetic construct
  source 1..22: mol_type = other RNA
accttcacttctttctttcttt

SEQ ID NO: 15322 - RNA, 22 nt, synthetic construct
  source 1..22: mol_type = other RNA
actgacaaaccttcacttcttt

SEQ ID NO: 15323 - RNA, 22 nt, synthetic construct
  source 1..22: mol_type = other RNA
agaaaagaaagaaagaagtgaa

SEQ ID NO: 15324 - RNA, 22 nt, synthetic construct
  source 1..22: mol_type = other RNA
agaaagaaagaagtgaaggttt

SEQ ID NO: 15325 - RNA, 22 nt, synthetic construct
  source 1..22: mol_type = other RNA
agaaagaagtgaaggtttgtca

SEQ ID NO: 15326 - RNA, 22 nt, synthetic construct
  source 1..22: mol_type = other RNA
agaaagagaaaagaaaagaaag

SEQ ID NO: 15327 - RNA, 22 nt, synthetic construct
  source 1..22: mol_type = other RNA
agagaaaagaaaagaaagaaag

SEQ ID NO: 15328 - RNA, 22 nt, synthetic construct
  source 1..22: mol_type = other RNA
caaaccttcacttctttctttc

SEQ ID NO: 15329 - RNA, 22 nt, synthetic construct
  source 1..22: mol_type = other RNA
cacttctttctttcttttcttt

SEQ ID NO: 15330 - RNA, 22 nt, synthetic construct
  source 1..22: mol_type = other RNA
cccctgactgacaaaccttcac

SEQ ID NO: 15331 - RNA, 22 nt, synthetic construct
  source 1..22: mol_type = other RNA
ccctgactgacaaaccttcact

SEQ ID NO: 15332 - RNA, 22 nt, synthetic construct
  source 1..22: mol_type = other RNA
cctgactgacaaaccttcactt

SEQ ID NO: 15333 - RNA, 22 nt, synthetic construct
  source 1..22: mol_type = other RNA
ccttcacttctttctttctttt

SEQ ID NO: 15334 - RNA, 22 nt, synthetic construct
  source 1..22: mol_type = other RNA
ctcccctgactgacaaaccttc

SEQ ID NO: 15335 - RNA, 22 nt, synthetic construct
  source 1..22: mol_type = other RNA
ctgacaaaccttcacttctttc

SEQ ID NO: 15336 - RNA, 22 nt, synthetic construct
  source 1..22: mol_type = other RNA
ctgactgacaaaccttcacttc

SEQ ID NO: 15337 - RNA, 22 nt, synthetic construct
  source 1..22: mol_type = other RNA
cttcacttctttctttcttttc

SEQ ID NO: 15338 - RNA, 22 nt, synthetic construct
  source 1..22: mol_type = other RNA
ctttctttcttttcttttctct

SEQ ID NO: 15339 - RNA, 22 nt, synthetic construct
  source 1..22: mol_type = other RNA
gaaaagaaaagaaagaaagaag

SEQ ID NO: 15340 - RNA, 22 nt, synthetic construct
  source 1..22: mol_type = other RNA
gaaaagaaagaaagaagtgaag

SEQ ID NO: 15341 - RNA, 22 nt, synthetic construct
  source 1..22: mol_type = other RNA
gaaagaaagaagtgaaggtttg

SEQ ID NO: 15342 - RNA, 22 nt, synthetic construct
  source 1..22: mol_type = other RNA
gaaagaagtgaaggtttgtcag

SEQ ID NO: 15343 - RNA, 22 nt, synthetic construct
  source 1..22: mol_type = other RNA
gaaagagaaaagaaaagaaaga

SEQ ID NO: 15344 - RNA, 22 nt, synthetic construct
  source 1..22: mol_type = other RNA
gacaaaccttcacttctttctt

SEQ ID NO: 15345 - RNA, 22 nt, synthetic construct
  source 1..22: mol_type = other RNA
gactgacaaaccttcacttctt

SEQ ID NO: 15346 - RNA, 22 nt, synthetic construct
  source 1..22: mol_type = other RNA
gagaaaagaaaagaaagaaaga

SEQ ID NO: 15347 - RNA, 22 nt, synthetic construct
  source 1..22: mol_type = other RNA
tcacttctttctttcttttctt

SEQ ID NO: 15348 - RNA, 22 nt, synthetic construct
  source 1..22: mol_type = other RNA
tcccctgactgacaaaccttca

SEQ ID NO: 15349 - RNA, 22 nt, synthetic construct
  source 1..22: mol_type = other RNA
tctttctttcttttcttttctc

SEQ ID NO: 15350 - RNA, 22 nt, synthetic construct
  source 1..22: mol_type = other RNA
tgacaaaccttcacttctttct

SEQ ID NO: 15351 - RNA, 22 nt, synthetic construct
  source 1..22: mol_type = other RNA
tgactgacaaaccttcacttct

SEQ ID NO: 15352 - RNA, 22 nt, synthetic construct
  source 1..22: mol_type = other RNA
ttcacttctttctttcttttct

SEQ ID NO: 15353 - RNA, 20 nt, synthetic construct
  source 1..20: mol_type = other RNA
aaaaggtgagcgcgcttagt

SEQ ID NO: 15354 - RNA, 20 nt, synthetic construct
  source 1..20: mol_type = other RNA
aaagataatccaagatggtt

SEQ ID NO: 15355 - RNA, 20 nt, synthetic construct
  source 1..20: mol_type = other RNA
aaaggtgagcgcgcttagtg

SEQ ID NO: 15356 - RNA, 20 nt, synthetic construct
  source 1..20: mol_type = other RNA
aaagtgctcaagatctctgg

SEQ ID NO: 15357 - RNA, 20 nt, synthetic construct
  source 1..20: mol_type = other RNA
aacagtcttggtaaccatct

SEQ ID NO: 15358 - RNA, 20 nt, synthetic construct
  source 1..20: mol_type = other RNA
aaccatcttggattatcttt

SEQ ID NO: 15359 - RNA, 20 nt, synthetic construct
  source 1..20: mol_type = other RNA
aagactgttgaggacgccag

SEQ ID NO: 15360 - RNA, 20 nt, synthetic construct
  source 1..20: mol_type = other RNA
aagataatccaagatggtta

SEQ ID NO: 15361 - RNA, 20 nt, synthetic construct
  source 1..20: mol_type = other RNA
aagatctctggcgtcctcaa

SEQ ID NO: 15362 - RNA, 20 nt, synthetic construct
  source 1..20: mol_type = other RNA
aagatggttaccaagactgt

SEQ ID NO: 15363 - RNA, 20 nt, synthetic construct
  source 1..20: mol_type = other RNA
aaggtgagcgcgcttagtgt

SEQ ID NO: 15364 - RNA, 20 nt, synthetic construct
  source 1..20: mol_type = other RNA
aagtacctggcaatacacta

SEQ ID NO: 15365 - RNA, 20 nt, synthetic construct
  source 1..20: mol_type = other RNA
aagtgctcaagatctctggc

SEQ ID NO: 15366 - RNA, 20 nt, synthetic construct
  source 1..20: mol_type = other RNA
aataaagataatccaagatg

SEQ ID NO: 15367 - RNA, 20 nt, synthetic construct
  source 1..20: mol_type = other RNA
aatacactaagcgcgctcac

SEQ ID NO: 15368 - RNA, 20 nt, synthetic construct
  source 1..20: mol_type = other RNA
aatccaagatggttaccaag

SEQ ID NO: 15369 - RNA, 20 nt, synthetic construct
  source 1..20: mol_type = other RNA
acagtcttggtaaccatctt

SEQ ID NO: 15370 - RNA, 20 nt, synthetic construct
  source 1..20: mol_type = other RNA
accaagactgttgaggacgc

SEQ ID NO: 15371 - RNA, 20 nt, synthetic construct
  source 1..20: mol_type = other RNA
accatcttggattatcttta

SEQ ID NO: 15372 - RNA, 20 nt, synthetic construct
  source 1..20: mol_type = other RNA
accattaataaagataatcc

SEQ ID NO: 15373 - RNA, 20 nt, synthetic construct
  source 1..20: mol_type = other RNA
acctggcaatacactaagcg

SEQ ID NO: 15374 - RNA, 20 nt, synthetic construct
  source 1..20: mol_type = other RNA
acgccagagatcttgagcac

SEQ ID NO: 15375 - RNA, 20 nt, synthetic construct
  source 1..20: mol_type = other RNA
actgttgaggacgccagaga

SEQ ID NO: 15376 - RNA, 20 nt, synthetic construct
  source 1..20: mol_type = other RNA
acttagaaagtgctcaagat

SEQ ID NO: 15377 - RNA, 20 nt, synthetic construct
  source 1..20: mol_type = other RNA
actttctaagtacctggcaa

SEQ ID NO: 15378 - RNA, 20 nt, synthetic construct
  source 1..20: mol_type = other RNA
agaaagtgctcaagatctct

SEQ ID NO: 15379 - RNA, 20 nt, synthetic construct
  source 1..20: mol_type = other RNA
agactgttgaggacgccaga

SEQ ID NO: 15380 - RNA, 20 nt, synthetic construct
  source 1..20: mol_type = other RNA
agagatcttgagcactttct

SEQ ID NO: 15381 - RNA, 20 nt, synthetic construct
  source 1..20: mol_type = other RNA
agataatccaagatggttac

SEQ ID NO: 15382 - RNA, 20 nt, synthetic construct
  source 1..20: mol_type = other RNA
agatctctggcgtcctcaac

SEQ ID NO: 15383 - RNA, 20 nt, synthetic construct
  source 1..20: mol_type = other RNA
agatcttgagcactttctaa

SEQ ID NO: 15384 - RNA, 20 nt, synthetic construct
  source 1..20: mol_type = other RNA
agatggttaccaagactgtt

SEQ ID NO: 15385 - RNA, 20 nt, synthetic construct
  source 1..20: mol_type = other RNA
agcactttctaagtacctgg

SEQ ID NO: 15386 - RNA, 20 nt, synthetic construct
  source 1..20: mol_type = other RNA
agcgcgcttagtgtattgcc

SEQ ID NO: 15387 - RNA, 20 nt, synthetic construct
  source 1..20: mol_type = other RNA
aggaaaaggtgagcgcgctt

SEQ ID NO: 15388 - RNA, 20 nt, synthetic construct
  source 1..20: mol_type = other RNA
aggacgccagagatcttgag

SEQ ID NO: 15389 - RNA, 20 nt, synthetic construct
  source 1..20: mol_type = other RNA
aggtacttagaaagtgctca

SEQ ID NO: 15390 - RNA, 20 nt, synthetic construct
  source 1..20: mol_type = other RNA
aggtgagcgcgcttagtgta

SEQ ID NO: 15391 - RNA, 20 nt, synthetic construct
  source 1..20: mol_type = other RNA
agtacctggcaatacactaa

SEQ ID NO: 15392 - RNA, 20 nt, synthetic construct
  source 1..20: mol_type = other RNA
agtcttggtaaccatcttgg

SEQ ID NO: 15393 - RNA, 20 nt, synthetic construct
  source 1..20: mol_type = other RNA
agtgctcaagatctctggcg

SEQ ID NO: 15394 - RNA, 20 nt, synthetic construct
  source 1..20: mol_type = other RNA
agtgtattgccaggtactta

SEQ ID NO: 15395 - RNA, 20 nt, synthetic construct
  source 1..20: mol_type = other RNA
ataaagataatccaagatgg

SEQ ID NO: 15396 - RNA, 20 nt, synthetic construct
  source 1..20: mol_type = other RNA
ataatccaagatggttacca

SEQ ID NO: 15397 - RNA, 20 nt, synthetic construct
  source 1..20: mol_type = other RNA
atacactaagcgcgctcacc

SEQ ID NO: 15398 - RNA, 20 nt, synthetic construct
  source 1..20: mol_type = other RNA
atccaagatggttaccaaga

SEQ ID NO: 15399 - RNA, 20 nt, synthetic construct
  source 1..20: mol_type = other RNA
atctctggcgtcctcaacag

SEQ ID NO: 15400 - RNA, 20 nt, synthetic construct
  source 1..20: mol_type = other RNA
atcttgagcactttctaagt

SEQ ID NO: 15401 - RNA, 20 nt, synthetic construct
  source 1..20: mol_type = other RNA
atggttaccaagactgttga

SEQ ID NO: 15402 - RNA, 20 nt, synthetic construct
  source 1..20: mol_type = other RNA
attgccaggtacttagaaag

SEQ ID NO: 15403 - RNA, 20 nt, synthetic construct
  source 1..20: mol_type = other RNA
caacagtcttggtaaccatc

SEQ ID NO: 15404 - RNA, 20 nt, synthetic construct
  source 1..20: mol_type = other RNA
caagactgttgaggacgcca

SEQ ID NO: 15405 - RNA, 20 nt, synthetic construct
  source 1..20: mol_type = other RNA
caagatctctggcgtcctca

SEQ ID NO: 15406 - RNA, 20 nt, synthetic construct
  source 1..20: mol_type = other RNA
caagatggttaccaagactg

SEQ ID NO: 15407 - RNA, 20 nt, synthetic construct
  source 1..20: mol_type = other RNA
caatacactaagcgcgctca

SEQ ID NO: 15408 - RNA, 20 nt, synthetic construct
  source 1..20: mol_type = other RNA
cactttctaagtacctggca

SEQ ID NO: 15409 - RNA, 20 nt, synthetic construct
  source 1..20: mol_type = other RNA
cagagatcttgagcactttc

SEQ ID NO: 15410 - RNA, 20 nt, synthetic construct
  source 1..20: mol_type = other RNA
caggtacttagaaagtgctc

SEQ ID NO: 15411 - RNA, 20 nt, synthetic construct
  source 1..20: mol_type = other RNA
cagtcttggtaaccatcttg

SEQ ID NO: 15412 - RNA, 20 nt, synthetic construct
  source 1..20: mol_type = other RNA
catcttggattatctttatt

SEQ ID NO: 15413 - RNA, 20 nt, synthetic construct
  source 1..20: mol_type = other RNA
ccaagactgttgaggacgcc

SEQ ID NO: 15414 - RNA, 20 nt, synthetic construct
  source 1..20: mol_type = other RNA
ccaagatggttaccaagact

SEQ ID NO: 15415 - RNA, 20 nt, synthetic construct
  source 1..20: mol_type = other RNA
ccagagatcttgagcacttt

SEQ ID NO: 15416 - RNA, 20 nt, synthetic construct
  source 1..20: mol_type = other RNA
ccaggtacttagaaagtgct

SEQ ID NO: 15417 - RNA, 20 nt, synthetic construct
  source 1..20: mol_type = other RNA
ccatcttggattatctttat

SEQ ID NO: 15418 - RNA, 20 nt, synthetic construct
  source 1..20: mol_type = other RNA
ccattaataaagataatcca

SEQ ID NO: 15419 - RNA, 20 nt, synthetic construct
  source 1..20: mol_type = other RNA
cctcaacagtcttggtaacc

SEQ ID NO: 15420 - RNA, 20 nt, synthetic construct
  source 1..20: mol_type = other RNA
cctggcaatacactaagcgc

SEQ ID NO: 15421 - RNA, 20 nt, synthetic construct
  source 1..20: mol_type = other RNA
cgccagagatcttgagcact

SEQ ID NO: 15422 - RNA, 20 nt, synthetic construct
  source 1..20: mol_type = other RNA
cgcgcttagtgtattgccag

SEQ ID NO: 15423 - RNA, 20 nt, synthetic construct
  source 1..20: mol_type = other RNA
cgcttagtgtattgccaggt

SEQ ID NO: 15424 - RNA, 20 nt, synthetic construct
  source 1..20: mol_type = other RNA
cgtcctcaacagtcttggta

SEQ ID NO: 15425 - RNA, 20 nt, synthetic construct
  source 1..20: mol_type = other RNA
ctaagtacctggcaatacac

SEQ ID NO: 15426 - RNA, 20 nt, synthetic construct
  source 1..20: mol_type = other RNA
ctcaacagtcttggtaacca

SEQ ID NO: 15427 - RNA, 20 nt, synthetic construct
  source 1..20: mol_type = other RNA
ctcaagatctctggcgtcct

SEQ ID NO: 15428 - RNA, 20 nt, synthetic construct
  source 1..20: mol_type = other RNA
ctctggcgtcctcaacagtc

SEQ ID NO: 15429 - RNA, 20 nt, synthetic construct
  source 1..20: mol_type = other RNA
ctggcaatacactaagcgcg

SEQ ID NO: 15430 - RNA, 20 nt, synthetic construct
  source 1..20: mol_type = other RNA
ctggcgtcctcaacagtctt

SEQ ID NO: 15431 - RNA, 20 nt, synthetic construct
  source 1..20: mol_type = other RNA
ctgttgaggacgccagagat

SEQ ID NO: 15432 - RNA, 20 nt, synthetic construct
  source 1..20: mol_type = other RNA
cttagaaagtgctcaagatc

SEQ ID NO: 15433 - RNA, 20 nt, synthetic construct
  source 1..20: mol_type = other RNA
cttagtgtattgccaggtac

SEQ ID NO: 15434 - RNA, 20 nt, synthetic construct
  source 1..20: mol_type = other RNA
cttgagcactttctaagtac

SEQ ID NO: 15435 - RNA, 20 nt, synthetic construct
  source 1..20: mol_type = other RNA
cttggtaaccatcttggatt

SEQ ID NO: 15436 - RNA, 20 nt, synthetic construct
  source 1..20: mol_type = other RNA
ctttctaagtacctggcaat

SEQ ID NO: 15437 - RNA, 20 nt, synthetic construct
  source 1..20: mol_type = other RNA
gaaaaggtgagcgcgcttag

SEQ ID NO: 15438 - RNA, 20 nt, synthetic construct
  source 1..20: mol_type = other RNA
gaaagtgctcaagatctctg

SEQ ID NO: 15439 - RNA, 20 nt, synthetic construct
  source 1..20: mol_type = other RNA
gacgccagagatcttgagca

SEQ ID NO: 15440 - RNA, 20 nt, synthetic construct
  source 1..20: mol_type = other RNA
gactgttgaggacgccagag

SEQ ID NO: 15441 - RNA, 20 nt, synthetic construct
  source 1..20: mol_type = other RNA
gagatcttgagcactttcta

SEQ ID NO: 15442 - RNA, 20 nt, synthetic construct
  source 1..20: mol_type = other RNA
gagcactttctaagtacctg

SEQ ID NO: 15443 - RNA, 20 nt, synthetic construct
  source 1..20: mol_type = other RNA
gagcgcgcttagtgtattgc

SEQ ID NO: 15444 - RNA, 20 nt, synthetic construct
  source 1..20: mol_type = other RNA
gaggaaaaggtgagcgcgct

SEQ ID NO: 15445 - RNA, 20 nt, synthetic construct
  source 1..20: mol_type = other RNA
gaggacgccagagatcttga

SEQ ID NO: 15446 - RNA, 20 nt, synthetic construct
  source 1..20: mol_type = other RNA
gataatccaagatggttacc

SEQ ID NO: 15447 - RNA, 20 nt, synthetic construct
  source 1..20: mol_type = other RNA
gatctctggcgtcctcaaca

SEQ ID NO: 15448 - RNA, 20 nt, synthetic construct
  source 1..20: mol_type = other RNA
gatcttgagcactttctaag

SEQ ID NO: 15449 - RNA, 20 nt, synthetic construct
  source 1..20: mol_type = other RNA
gatggttaccaagactgttg

SEQ ID NO: 15450 - RNA, 20 nt, synthetic construct
  source 1..20: mol_type = other RNA
gcaatacactaagcgcgctc

SEQ ID NO: 15451 - RNA, 20 nt, synthetic construct
  source 1..20: mol_type = other RNA
gcactttctaagtacctggc

SEQ ID NO: 15452 - RNA, 20 nt, synthetic construct
  source 1..20: mol_type = other RNA
gccagagatcttgagcactt

SEQ ID NO: 15453 - RNA, 20 nt, synthetic construct
  source 1..20: mol_type = other RNA
gccaggtacttagaaagtgc

SEQ ID NO: 15454 - RNA, 20 nt, synthetic construct
  source 1..20: mol_type = other RNA
gcgcgcttagtgtattgcca

SEQ ID NO: 15455 - RNA, 20 nt, synthetic construct
  source 1..20: mol_type = other RNA
gcgcttagtgtattgccagg

SEQ ID NO: 15456 - RNA, 20 nt, synthetic construct
  source 1..20: mol_type = other RNA
gcgtcctcaacagtcttggt

SEQ ID NO: 15457 - RNA, 20 nt, synthetic construct
  source 1..20: mol_type = other RNA
gctcaagatctctggcgtcc

SEQ ID NO: 15458 - RNA, 20 nt, synthetic construct
  source 1..20: mol_type = other RNA
gcttagtgtattgccaggta

SEQ ID NO: 15459 - RNA, 20 nt, synthetic construct
  source 1..20: mol_type = other RNA
ggaaaaggtgagcgcgctta

SEQ ID NO: 15460 - RNA, 20 nt, synthetic construct
  source 1..20: mol_type = other RNA
ggacgccagagatcttgagc

SEQ ID NO: 15461 - RNA, 20 nt, synthetic construct
  source 1..20: mol_type = other RNA
ggcaatacactaagcgcgct

SEQ ID NO: 15462 - RNA, 20 nt, synthetic construct
  source 1..20: mol_type = other RNA
ggcgtcctcaacagtcttgg

SEQ ID NO: 15463 - RNA, 20 nt, synthetic construct
  source 1..20: mol_type = other RNA
ggtaaccatcttggattatc

SEQ ID NO: 15464 - RNA, 20 nt, synthetic construct
  source 1..20: mol_type = other RNA
ggtacttagaaagtgctcaa

SEQ ID NO: 15465 - RNA, 20 nt, synthetic construct
  source 1..20: mol_type = other RNA
ggtgagcgcgcttagtgtat

SEQ ID NO: 15466 - RNA, 20 nt, synthetic construct
  source 1..20: mol_type = other RNA
ggttaccaagactgttgagg

SEQ ID NO: 15467 - RNA, 20 nt, synthetic construct
  source 1..20: mol_type = other RNA
gtaaccatcttggattatct

SEQ ID NO: 15468 - RNA, 20 nt, synthetic construct
  source 1..20: mol_type = other RNA
gtacctggcaatacactaag

SEQ ID NO: 15469 - RNA, 20 nt, synthetic construct
  source 1..20: mol_type = other RNA
gtacttagaaagtgctcaag

SEQ ID NO: 15470 - RNA, 20 nt, synthetic construct
  source 1..20: mol_type = other RNA
gtattgccaggtacttagaa

SEQ ID NO: 15471 - RNA, 20 nt, synthetic construct
  source 1..20: mol_type = other RNA
gtcctcaacagtcttggtaa

SEQ ID NO: 15472 - RNA, 20 nt, synthetic construct
  source 1..20: mol_type = other RNA
gtcttggtaaccatcttgga

SEQ ID NO: 15473 - RNA, 20 nt, synthetic construct
  source 1..20: mol_type = other RNA
gtgagcgcgcttagtgtatt

SEQ ID NO: 15474 - RNA, 20 nt, synthetic construct
  source 1..20: mol_type = other RNA
gtgctcaagatctctggcgt

SEQ ID NO: 15475 - RNA, 20 nt, synthetic construct
  source 1..20: mol_type = other RNA
gtgtattgccaggtacttag

SEQ ID NO: 15476 - RNA, 20 nt, synthetic construct
  source 1..20: mol_type = other RNA
gttaccaagactgttgagga

SEQ ID NO: 15477 - RNA, 20 nt, synthetic construct
  source 1..20: mol_type = other RNA
gttgaggacgccagagatct

SEQ ID NO: 15478 - RNA, 20 nt, synthetic construct
  source 1..20: mol_type = other RNA
taaagataatccaagatggt

SEQ ID NO: 15479 - RNA, 20 nt, synthetic construct
  source 1..20: mol_type = other RNA
taaccatcttggattatctt

SEQ ID NO: 15480 - RNA, 20 nt, synthetic construct
  source 1..20: mol_type = other RNA
taagtacctggcaatacact

SEQ ID NO: 15481 - RNA, 20 nt, synthetic construct
  source 1..20: mol_type = other RNA
taatccaagatggttaccaa

SEQ ID NO: 15482 - RNA, 20 nt, synthetic construct
  source 1..20: mol_type = other RNA
taccaagactgttgaggacg

SEQ ID NO: 15483 - RNA, 20 nt, synthetic construct
  source 1..20: mol_type = other RNA
tacctggcaatacactaagc

SEQ ID NO: 15484 - RNA, 20 nt, synthetic construct
  source 1..20: mol_type = other RNA
tacttagaaagtgctcaaga

SEQ ID NO: 15485 - RNA, 20 nt, synthetic construct
  source 1..20: mol_type = other RNA
tagaaagtgctcaagatctc

SEQ ID NO: 15486 - RNA, 20 nt, synthetic construct
  source 1..20: mol_type = other RNA
tagtgtattgccaggtactt

SEQ ID NO: 15487 - RNA, 20 nt, synthetic construct
  source 1..20: mol_type = other RNA
tattgccaggtacttagaaa

SEQ ID NO: 15488 - RNA, 20 nt, synthetic construct
  source 1..20: mol_type = other RNA
tcaacagtcttggtaaccat

SEQ ID NO: 15489 - RNA, 20 nt, synthetic construct
  source 1..20: mol_type = other RNA
tcaagatctctggcgtcctc

SEQ ID NO: 15490 - RNA, 20 nt, synthetic construct
  source 1..20: mol_type = other RNA
tccaagatggttaccaagac

SEQ ID NO: 15491 - RNA, 20 nt, synthetic construct
  source 1..20: mol_type = other RNA
tcctcaacagtcttggtaac

SEQ ID NO: 15492 - RNA, 20 nt, synthetic construct
  source 1..20: mol_type = other RNA
tctaagtacctggcaataca

SEQ ID NO: 15493 - RNA, 20 nt, synthetic construct
  source 1..20: mol_type = other RNA
tctctggcgtcctcaacagt

SEQ ID NO: 15494 - RNA, 20 nt, synthetic construct
  source 1..20: mol_type = other RNA
tctggcgtcctcaacagtct

SEQ ID NO: 15495 - RNA, 20 nt, synthetic construct
  source 1..20: mol_type = other RNA
tcttgagcactttctaagta

SEQ ID NO: 15496 - RNA, 20 nt, synthetic construct
  source 1..20: mol_type = other RNA
tcttggtaaccatcttggat

SEQ ID NO: 15497 - RNA, 20 nt, synthetic construct
  source 1..20: mol_type = other RNA
tgagcactttctaagtacct

SEQ ID NO: 15498 - RNA, 20 nt, synthetic construct
  source 1..20: mol_type = other RNA
tgagcgcgcttagtgtattg

SEQ ID NO: 15499 - RNA, 20 nt, synthetic construct
  source 1..20: mol_type = other RNA
tgaggacgccagagatcttg

SEQ ID NO: 15500 - RNA, 20 nt, synthetic construct
  source 1..20: mol_type = other RNA
tgccaggtacttagaaagtg

SEQ ID NO: 15501 - RNA, 20 nt, synthetic construct
  source 1..20: mol_type = other RNA
tgctcaagatctctggcgtc

SEQ ID NO: 15502 - RNA, 20 nt, synthetic construct
  source 1..20: mol_type = other RNA
tggcaatacactaagcgcgc

SEQ ID NO: 15503 - RNA, 20 nt, synthetic construct
  source 1..20: mol_type = other RNA
tggcgtcctcaacagtcttg

SEQ ID NO: 15504 - RNA, 20 nt, synthetic construct
  source 1..20: mol_type = other RNA
tggtaaccatcttggattat

SEQ ID NO: 15505 - RNA, 20 nt, synthetic construct
  source 1..20: mol_type = other RNA
tggttaccaagactgttgag

SEQ ID NO: 15506 - RNA, 20 nt, synthetic construct
  source 1..20: mol_type = other RNA
tgtattgccaggtacttaga

SEQ ID NO: 15507 - RNA, 20 nt, synthetic construct
  source 1..20: mol_type = other RNA
tgttgaggacgccagagatc

SEQ ID NO: 15508 - RNA, 20 nt, synthetic construct
  source 1..20: mol_type = other RNA
ttaccaagactgttgaggac

SEQ ID NO: 15509 - RNA, 20 nt, synthetic construct
  source 1..20: mol_type = other RNA
ttagaaagtgctcaagatct

SEQ ID NO: 15510 - RNA, 20 nt, synthetic construct
  source 1..20: mol_type = other RNA
ttagtgtattgccaggtact

SEQ ID NO: 15511 - RNA, 20 nt, synthetic construct
  source 1..20: mol_type = other RNA
ttctaagtacctggcaatac

SEQ ID NO: 15512 - RNA, 20 nt, synthetic construct
  source 1..20: mol_type = other RNA
ttgagcactttctaagtacc

SEQ ID NO: 15513 - RNA, 20 nt, synthetic construct
  source 1..20: mol_type = other RNA
ttgaggacgccagagatctt

SEQ ID NO: 15514 - RNA, 20 nt, synthetic construct
  source 1..20: mol_type = other RNA
ttgccaggtacttagaaagt

SEQ ID NO: 15515 - RNA, 20 nt, synthetic construct
  source 1..20: mol_type = other RNA
ttggtaaccatcttggatta

SEQ ID NO: 15516 - RNA, 20 nt, synthetic construct
  source 1..20: mol_type = other RNA
tttctaagtacctggcaata

SEQ ID NO: 15517 - RNA, 21 nt, synthetic construct
  source 1..21: mol_type = other RNA
aaaaggtgagcgcgcttagtg

SEQ ID NO: 15518 - RNA, 21 nt, synthetic construct
  source 1..21: mol_type = other RNA
aaagataatccaagatggtta

SEQ ID NO: 15519 - RNA, 21 nt, synthetic construct
  source 1..21: mol_type = other RNA
aaaggtgagcgcgcttagtgt

SEQ ID NO: 15520 - RNA, 21 nt, synthetic construct
  source 1..21: mol_type = other RNA
aaagtgctcaagatctctggc

SEQ ID NO: 15521 - RNA, 21 nt, synthetic construct
  source 1..21: mol_type = other RNA
aacagtcttggtaaccatctt

SEQ ID NO: 15522 - RNA, 21 nt, synthetic construct
  source 1..21: mol_type = other RNA
aaccatcttggattatcttta

SEQ ID NO: 15523 - RNA, 21 nt, synthetic construct
  source 1..21: mol_type = other RNA
aagactgttgaggacgccaga

SEQ ID NO: 15524 - RNA, 21 nt, synthetic construct
  source 1..21: mol_type = other RNA
aagataatccaagatggttac

SEQ ID NO: 15525 - RNA, 21 nt, synthetic construct
  source 1..21: mol_type = other RNA
aagatctctggcgtcctcaac

SEQ ID NO: 15526 - RNA, 21 nt, synthetic construct
  source 1..21: mol_type = other RNA
aagatggttaccaagactgtt

SEQ ID NO: 15527 - RNA, 21 nt, synthetic construct
  source 1..21: mol_type = other RNA
aaggtgagcgcgcttagtgta

SEQ ID NO: 15528 - RNA, 21 nt, synthetic construct
  source 1..21: mol_type = other RNA
aagtacctggcaatacactaa

SEQ ID NO: 15529 - RNA, 21 nt, synthetic construct
  source 1..21: mol_type = other RNA
aagtgctcaagatctctggcg

SEQ ID NO: 15530 - RNA, 21 nt, synthetic construct
  source 1..21: mol_type = other RNA
aataaagataatccaagatgg

SEQ ID NO: 15531 - RNA, 21 nt, synthetic construct
  source 1..21: mol_type = other RNA
aatacactaagcgcgctcacc

SEQ ID NO: 15532 - RNA, 21 nt, synthetic construct
  source 1..21: mol_type = other RNA
aatccaagatggttaccaaga

SEQ ID NO: 15533 - RNA, 21 nt, synthetic construct
  source 1..21: mol_type = other RNA
acagtcttggtaaccatcttg

SEQ ID NO: 15534 - RNA, 21 nt, synthetic construct
  source 1..21: mol_type = other RNA
accaagactgttgaggacgcc

SEQ ID NO: 15535 - RNA, 21 nt, synthetic construct
  source 1..21: mol_type = other RNA
accatcttggattatctttat

SEQ ID NO: 15536 - RNA, 21 nt, synthetic construct
  source 1..21: mol_type = other RNA
acctggcaatacactaagcgc

SEQ ID NO: 15537 - RNA, 21 nt, synthetic construct
  source 1..21: mol_type = other RNA
acgccagagatcttgagcact

SEQ ID NO: 15538 - RNA, 21 nt, synthetic construct
  source 1..21: mol_type = other RNA
actgttgaggacgccagagat

SEQ ID NO: 15539 - RNA, 21 nt, synthetic construct
  source 1..21: mol_type = other RNA
acttagaaagtgctcaagatc

SEQ ID NO: 15540 - RNA, 21 nt, synthetic construct
  source 1..21: mol_type = other RNA
actttctaagtacctggcaat

SEQ ID NO: 15541 - RNA, 21 nt, synthetic construct
  source 1..21: mol_type = other RNA
agaaagtgctcaagatctctg

SEQ ID NO: 15542 - RNA, 21 nt, synthetic construct
  source 1..21: mol_type = other RNA
agactgttgaggacgccagag

SEQ ID NO: 15543 - RNA, 21 nt, synthetic construct
  source 1..21: mol_type = other RNA
agagatcttgagcactttcta

SEQ ID NO: 15544 - RNA, 21 nt, synthetic construct
  source 1..21: mol_type = other RNA
agataatccaagatggttacc

SEQ ID NO: 15545 - RNA, 21 nt, synthetic construct
  source 1..21: mol_type = other RNA
agatctctggcgtcctcaaca

SEQ ID NO: 15546 - RNA, 21 nt, synthetic construct
  source 1..21: mol_type = other RNA
agatcttgagcactttctaag

SEQ ID NO: 15547 - RNA, 21 nt, synthetic construct
  source 1..21: mol_type = other RNA
agatggttaccaagactgttg

SEQ ID NO: 15548 - RNA, 21 nt, synthetic construct
  source 1..21: mol_type = other RNA
agcactttctaagtacctggc

SEQ ID NO: 15549 - RNA, 21 nt, synthetic construct
  source 1..21: mol_type = other RNA
agcgcgcttagtgtattgcca

SEQ ID NO: 15550 - RNA, 21 nt, synthetic construct
  source 1..21: mol_type = other RNA
aggaaaaggtgagcgcgctta

SEQ ID NO: 15551 - RNA, 21 nt, synthetic construct
  source 1..21: mol_type = other RNA
aggacgccagagatcttgagc

SEQ ID NO: 15552 - RNA, 21 nt, synthetic construct
  source 1..21: mol_type = other RNA
aggtacttagaaagtgctcaa

SEQ ID NO: 15553 - RNA, 21 nt, synthetic construct
  source 1..21: mol_type = other RNA
aggtgagcgcgcttagtgtat

SEQ ID NO: 15554 - RNA, 21 nt, synthetic construct
  source 1..21: mol_type = other RNA
agtacctggcaatacactaag

SEQ ID NO: 15555 - RNA, 21 nt, synthetic construct
  source 1..21: mol_type = other RNA
agtcttggtaaccatcttgga

SEQ ID NO: 15556 - RNA, 21 nt, synthetic construct
  source 1..21: mol_type = other RNA
agtgctcaagatctctggcgt

SEQ ID NO: 15557 - RNA, 21 nt, synthetic construct
  source 1..21: mol_type = other RNA
agtgtattgccaggtacttag

SEQ ID NO: 15558 - RNA, 21 nt, synthetic construct
  source 1..21: mol_type = other RNA
ataaagataatccaagatggt

SEQ ID NO: 15559 - RNA, 21 nt, synthetic construct
  source 1..21: mol_type = other RNA
ataatccaagatggttaccaa

SEQ ID NO: 15560 - RNA, 21 nt, synthetic construct
  source 1..21: mol_type = other RNA
atccaagatggttaccaagac

SEQ ID NO: 15561 - RNA, 21 nt, synthetic construct
  source 1..21: mol_type = other RNA
atctctggcgtcctcaacagt

SEQ ID NO: 15562 - RNA, 21 nt, synthetic construct
  source 1..21: mol_type = other RNA
atcttgagcactttctaagta

SEQ ID NO: 15563 - RNA, 21 nt, synthetic construct
  source 1..21: mol_type = other RNA
atggttaccaagactgttgag

SEQ ID NO: 15564 - RNA, 21 nt, synthetic construct
  source 1..21: mol_type = other RNA
attgccaggtacttagaaagt

SEQ ID NO: 15565 - RNA, 21 nt, synthetic construct
  source 1..21: mol_type = other RNA
caacagtcttggtaaccatct

SEQ ID NO: 15566 - RNA, 21 nt, synthetic construct
  source 1..21: mol_type = other RNA
caagactgttgaggacgccag

SEQ ID NO: 15567 - RNA, 21 nt, synthetic construct
  source 1..21: mol_type = other RNA
caagatctctggcgtcctcaa

SEQ ID NO: 15568 - RNA, 21 nt, synthetic construct
  source 1..21: mol_type = other RNA
caagatggttaccaagactgt

SEQ ID NO: 15569 - RNA, 21 nt, synthetic construct
  source 1..21: mol_type = other RNA
caatacactaagcgcgctcac

SEQ ID NO: 15570 - RNA, 21 nt, synthetic construct
  source 1..21: mol_type = other RNA
cactttctaagtacctggcaa

SEQ ID NO: 15571 - RNA, 21 nt, synthetic construct
  source 1..21: mol_type = other RNA
cagagatcttgagcactttct

SEQ ID NO: 15572 - RNA, 21 nt, synthetic construct
  source 1..21: mol_type = other RNA
caggtacttagaaagtgctca

SEQ ID NO: 15573 - RNA, 21 nt, synthetic construct
  source 1..21: mol_type = other RNA
cagtcttggtaaccatcttgg

SEQ ID NO: 15574 - RNA, 21 nt, synthetic construct
  source 1..21: mol_type = other RNA
ccaagactgttgaggacgcca

SEQ ID NO: 15575 - RNA, 21 nt, synthetic construct
  source 1..21: mol_type = other RNA
ccaagatggttaccaagactg

SEQ ID NO: 15576 - RNA, 21 nt, synthetic construct
  source 1..21: mol_type = other RNA
ccagagatcttgagcactttc

SEQ ID NO: 15577 - RNA, 21 nt, synthetic construct
  source 1..21: mol_type = other RNA
ccaggtacttagaaagtgctc

SEQ ID NO: 15578 - RNA, 21 nt, synthetic construct
  source 1..21: mol_type = other RNA
ccatcttggattatctttatt

SEQ ID NO: 15579 - RNA, 21 nt, synthetic construct
  source 1..21: mol_type = other RNA
cctcaacagtcttggtaacca

SEQ ID NO: 15580 - RNA, 21 nt, synthetic construct
  source 1..21: mol_type = other RNA
cctggcaatacactaagcgcg

SEQ ID NO: 15581 - RNA, 21 nt, synthetic construct
  source 1..21: mol_type = other RNA
cgccagagatcttgagcactt

SEQ ID NO: 15582 - RNA, 21 nt, synthetic construct
  source 1..21: mol_type = other RNA
cgcgcttagtgtattgccagg

SEQ ID NO: 15583 - RNA, 21 nt, synthetic construct
  source 1..21: mol_type = other RNA
cgcttagtgtattgccaggta

SEQ ID NO: 15584 - RNA, 21 nt, synthetic construct
  source 1..21: mol_type = other RNA
cgtcctcaacagtcttggtaa

SEQ ID NO: 15585 - RNA, 21 nt, synthetic construct
  source 1..21: mol_type = other RNA
ctaagtacctggcaatacact

SEQ ID NO: 15586 - RNA, 21 nt, synthetic construct
  source 1..21: mol_type = other RNA
ctcaacagtcttggtaaccat

SEQ ID NO: 15587 - RNA, 21 nt, synthetic construct
  source 1..21: mol_type = other RNA
ctcaagatctctggcgtcctc

SEQ ID NO: 15588 - RNA, 21 nt, synthetic construct
  source 1..21: mol_type = other RNA
ctctggcgtcctcaacagtct

SEQ ID NO: 15589 - RNA, 21 nt, synthetic construct
  source 1..21: mol_type = other RNA
ctggcaatacactaagcgcgc

SEQ ID NO: 15590 - RNA, 21 nt, synthetic construct
  source 1..21: mol_type = other RNA
ctggcgtcctcaacagtcttg

SEQ ID NO: 15591 - RNA, 21 nt, synthetic construct
  source 1..21: mol_type = other RNA
ctgttgaggacgccagagatc

SEQ ID NO: 15592 - RNA, 21 nt, synthetic construct
  source 1..21: mol_type = other RNA
cttagaaagtgctcaagatct

SEQ ID NO: 15593 - RNA, 21 nt, synthetic construct
  source 1..21: mol_type = other RNA
cttagtgtattgccaggtact

SEQ ID NO: 15594 - RNA, 21 nt, synthetic construct
  source 1..21: mol_type = other RNA
cttgagcactttctaagtacc

SEQ ID NO: 15595 - RNA, 21 nt, synthetic construct
  source 1..21: mol_type = other RNA
cttggtaaccatcttggatta

SEQ ID NO: 15596 - RNA, 21 nt, synthetic construct
  source 1..21: mol_type = other RNA
ctttctaagtacctggcaata

SEQ ID NO: 15597 - RNA, 21 nt, synthetic construct
  source 1..21: mol_type = other RNA
gaaaaggtgagcgcgcttagt

SEQ ID NO: 15598 - RNA, 21 nt, synthetic construct
  source 1..21: mol_type = other RNA
gaaagtgctcaagatctctgg

SEQ ID NO: 15599 - RNA, 21 nt, synthetic construct
  source 1..21: mol_type = other RNA
gacgccagagatcttgagcac

SEQ ID NO: 15600 - RNA, 21 nt, synthetic construct
  source 1..21: mol_type = other RNA
gactgttgaggacgccagaga

SEQ ID NO: 15601 - RNA, 21 nt, synthetic construct
  source 1..21: mol_type = other RNA
gagatcttgagcactttctaa

SEQ ID NO: 15602 - RNA, 21 nt, synthetic construct
  source 1..21: mol_type = other RNA
gagcactttctaagtacctgg

SEQ ID NO: 15603 - RNA, 21 nt, synthetic construct
  source 1..21: mol_type = other RNA
gagcgcgcttagtgtattgcc

SEQ ID NO: 15604 - RNA, 21 nt, synthetic construct
  source 1..21: mol_type = other RNA
gaggaaaaggtgagcgcgctt

SEQ ID NO: 15605 - RNA, 21 nt, synthetic construct
  source 1..21: mol_type = other RNA
gaggacgccagagatcttgag

SEQ ID NO: 15606 - RNA, 21 nt, synthetic construct
  source 1..21: mol_type = other RNA
gataatccaagatggttacca

SEQ ID NO: 15607 - RNA, 21 nt, synthetic construct
  source 1..21: mol_type = other RNA
gatctctggcgtcctcaacag

SEQ ID NO: 15608 - RNA, 21 nt, synthetic construct
  source 1..21: mol_type = other RNA
gatcttgagcactttctaagt

SEQ ID NO: 15609 - RNA, 21 nt, synthetic construct
  source 1..21: mol_type = other RNA
gatggttaccaagactgttga

SEQ ID NO: 15610 - RNA, 21 nt, synthetic construct
  source 1..21: mol_type = other RNA
gcaatacactaagcgcgctca

SEQ ID NO: 15611 - RNA, 21 nt, synthetic construct
  source 1..21: mol_type = other RNA
gcactttctaagtacctggca

SEQ ID NO: 15612 - RNA, 21 nt, synthetic construct
  source 1..21: mol_type = other RNA
gccagagatcttgagcacttt

SEQ ID NO: 15613 - RNA, 21 nt, synthetic construct
  source 1..21: mol_type = other RNA
gccaggtacttagaaagtgct

SEQ ID NO: 15614 - RNA, 21 nt, synthetic construct
  source 1..21: mol_type = other RNA
gcgcgcttagtgtattgccag

SEQ ID NO: 15615 - RNA, 21 nt, synthetic construct
  source 1..21: mol_type = other RNA
gcgcttagtgtattgccaggt

SEQ ID NO: 15616 - RNA, 21 nt, synthetic construct
  source 1..21: mol_type = other RNA
gcgtcctcaacagtcttggta

SEQ ID NO: 15617 - RNA, 21 nt, synthetic construct
  source 1..21: mol_type = other RNA
gctcaagatctctggcgtcct

SEQ ID NO: 15618 - RNA, 21 nt, synthetic construct
  source 1..21: mol_type = other RNA
gcttagtgtattgccaggtac

SEQ ID NO: 15619 - RNA, 21 nt, synthetic construct
  source 1..21: mol_type = other RNA
ggaaaaggtgagcgcgcttag

SEQ ID NO: 15620 - RNA, 21 nt, synthetic construct
  source 1..21: mol_type = other RNA
ggacgccagagatcttgagca

SEQ ID NO: 15621 - RNA, 21 nt, synthetic construct
  source 1..21: mol_type = other RNA
ggcaatacactaagcgcgctc

SEQ ID NO: 15622 - RNA, 21 nt, synthetic construct
  source 1..21: mol_type = other RNA
ggcgtcctcaacagtcttggt

SEQ ID NO: 15623 - RNA, 21 nt, synthetic construct
  source 1..21: mol_type = other RNA
ggtaaccatcttggattatct

SEQ ID NO: 15624 - RNA, 21 nt, synthetic construct
  source 1..21: mol_type = other RNA
ggtacttagaaagtgctcaag

SEQ ID NO: 15625 - RNA, 21 nt, synthetic construct
  source 1..21: mol_type = other RNA
ggtgagcgcgcttagtgtatt

SEQ ID NO: 15626 - RNA, 21 nt, synthetic construct
  source 1..21: mol_type = other RNA
ggttaccaagactgttgagga

SEQ ID NO: 15627 - RNA, 21 nt, synthetic construct
  source 1..21: mol_type = other RNA
gtaaccatcttggattatctt

SEQ ID NO: 15628 - RNA, 21 nt, synthetic construct
  source 1..21: mol_type = other RNA
gtacctggcaatacactaagc

SEQ ID NO: 15629 - RNA, 21 nt, synthetic construct
  source 1..21: mol_type = other RNA
gtacttagaaagtgctcaaga

SEQ ID NO: 15630 - RNA, 21 nt, synthetic construct
  source 1..21: mol_type = other RNA
gtattgccaggtacttagaaa

SEQ ID NO: 15631 - RNA, 21 nt, synthetic construct
  source 1..21: mol_type = other RNA
gtcctcaacagtcttggtaac

SEQ ID NO: 15632 - RNA, 21 nt, synthetic construct
  source 1..21: mol_type = other RNA
gtcttggtaaccatcttggat

SEQ ID NO: 15633 - RNA, 21 nt, synthetic construct
  source 1..21: mol_type = other RNA
gtgagcgcgcttagtgtattg

SEQ ID NO: 15634 - RNA, 21 nt, synthetic construct
  source 1..21: mol_type = other RNA
gtgctcaagatctctggcgtc

SEQ ID NO: 15635 - RNA, 21 nt, synthetic construct
  source 1..21: mol_type = other RNA
gtgtattgccaggtacttaga

SEQ ID NO: 15636 - RNA, 21 nt, synthetic construct
  source 1..21: mol_type = other RNA
gttaccaagactgttgaggac

SEQ ID NO: 15637 - RNA, 21 nt, synthetic construct
  source 1..21: mol_type = other RNA
gttgaggacgccagagatctt

SEQ ID NO: 15638 - RNA, 21 nt, synthetic construct
  source 1..21: mol_type = other RNA
taaagataatccaagatggtt

SEQ ID NO: 15639 - RNA, 21 nt, synthetic construct
  source 1..21: mol_type = other RNA
taaccatcttggattatcttt

SEQ ID NO: 15640 - RNA, 21 nt, synthetic construct
  source 1..21: mol_type = other RNA
taagtacctggcaatacacta

SEQ ID NO: 15641 - RNA, 21 nt, synthetic construct
  source 1..21: mol_type = other RNA
taatccaagatggttaccaag

SEQ ID NO: 15642 - RNA, 21 nt, synthetic construct
  source 1..21: mol_type = other RNA
taccaagactgttgaggacgc

SEQ ID NO: 15643 - RNA, 21 nt, synthetic construct
  source 1..21: mol_type = other RNA
tacctggcaatacactaagcg

SEQ ID NO: 15644 - RNA, 21 nt, synthetic construct
  source 1..21: mol_type = other RNA
tacttagaaagtgctcaagat

SEQ ID NO: 15645 - RNA, 21 nt, synthetic construct
  source 1..21: mol_type = other RNA
tagaaagtgctcaagatctct

SEQ ID NO: 15646 - RNA, 21 nt, synthetic construct
  source 1..21: mol_type = other RNA
tagtgtattgccaggtactta

SEQ ID NO: 15647 - RNA, 21 nt, synthetic construct
  source 1..21: mol_type = other RNA
tattgccaggtacttagaaag

SEQ ID NO: 15648 - RNA, 21 nt, synthetic construct
  source 1..21: mol_type = other RNA
tcaacagtcttggtaaccatc

SEQ ID NO: 15649 - RNA, 21 nt, synthetic construct
  source 1..21: mol_type = other RNA
tcaagatctctggcgtcctca

SEQ ID NO: 15650 - RNA, 21 nt, synthetic construct
  source 1..21: mol_type = other RNA
tccaagatggttaccaagact

SEQ ID NO: 15651 - RNA, 21 nt, synthetic construct
  source 1..21: mol_type = other RNA
tcctcaacagtcttggtaacc

SEQ ID NO: 15652 - RNA, 21 nt, synthetic construct
  source 1..21: mol_type = other RNA
tctaagtacctggcaatacac

SEQ ID NO: 15653 - RNA, 21 nt, synthetic construct
  source 1..21: mol_type = other RNA
tctctggcgtcctcaacagtc

SEQ ID NO: 15654 - RNA, 21 nt, synthetic construct
  source 1..21: mol_type = other RNA
tctggcgtcctcaacagtctt

SEQ ID NO: 15655 - RNA, 21 nt, synthetic construct
  source 1..21: mol_type = other RNA
tcttgagcactttctaagtac

SEQ ID NO: 15656 - RNA, 21 nt, synthetic construct
  source 1..21: mol_type = other RNA
tcttggtaaccatcttggatt

SEQ ID NO: 15657 - RNA, 21 nt, synthetic construct
  source 1..21: mol_type = other RNA
tgagcactttctaagtacctg

SEQ ID NO: 15658 - RNA, 21 nt, synthetic construct
  source 1..21: mol_type = other RNA
tgagcgcgcttagtgtattgc

SEQ ID NO: 15659 - RNA, 21 nt, synthetic construct
  source 1..21: mol_type = other RNA
tgaggacgccagagatcttga

SEQ ID NO: 15660 - RNA, 21 nt, synthetic construct
  source 1..21: mol_type = other RNA
tgccaggtacttagaaagtgc

SEQ ID NO: 15661 - RNA, 21 nt, synthetic construct
  source 1..21: mol_type = other RNA
tgctcaagatctctggcgtcc

SEQ ID NO: 15662 - RNA, 21 nt, synthetic construct
  source 1..21: mol_type = other RNA
tggcaatacactaagcgcgct

SEQ ID NO: 15663 - RNA, 21 nt, synthetic construct
  source 1..21: mol_type = other RNA
tggcgtcctcaacagtcttgg

SEQ ID NO: 15664 - RNA, 21 nt, synthetic construct
  source 1..21: mol_type = other RNA
tggtaaccatcttggattatc

SEQ ID NO: 15665 - RNA, 21 nt, synthetic construct
  source 1..21: mol_type = other RNA
tggttaccaagactgttgagg

SEQ ID NO: 15666 - RNA, 21 nt, synthetic construct
  source 1..21: mol_type = other RNA
tgtattgccaggtacttagaa

SEQ ID NO: 15667 - RNA, 21 nt, synthetic construct
  source 1..21: mol_type = other RNA
tgttgaggacgccagagatct

SEQ ID NO: 15668 - RNA, 21 nt, synthetic construct
  source 1..21: mol_type = other RNA
ttaccaagactgttgaggacg

SEQ ID NO: 15669 - RNA, 21 nt, synthetic construct
  source 1..21: mol_type = other RNA
ttagaaagtgctcaagatctc

SEQ ID NO: 15670 - RNA, 21 nt, synthetic construct
  source 1..21: mol_type = other RNA
ttagtgtattgccaggtactt

SEQ ID NO: 15671 - RNA, 21 nt, synthetic construct
  source 1..21: mol_type = other RNA
ttctaagtacctggcaataca

SEQ ID NO: 15672 - RNA, 21 nt, synthetic construct
  source 1..21: mol_type = other RNA
ttgagcactttctaagtacct

SEQ ID NO: 15673 - RNA, 21 nt, synthetic construct
  source 1..21: mol_type = other RNA
ttgaggacgccagagatcttg

SEQ ID NO: 15674 - RNA, 21 nt, synthetic construct
  source 1..21: mol_type = other RNA
ttgccaggtacttagaaagtg

SEQ ID NO: 15675 - RNA, 21 nt, synthetic construct
  source 1..21: mol_type = other RNA
ttggtaaccatcttggattat

SEQ ID NO: 15676 - RNA, 21 nt, synthetic construct
  source 1..21: mol_type = other RNA
tttctaagtacctggcaatac

SEQ ID NO: 15677 - RNA, 22 nt, synthetic construct
  source 1..22: mol_type = other RNA
aaaaggtgagcgcgcttagtgt

SEQ ID NO: 15678 - RNA, 22 nt, synthetic construct
  source 1..22: mol_type = other RNA
aaagataatccaagatggttac

SEQ ID NO: 15679 - RNA, 22 nt, synthetic construct
  source 1..22: mol_type = other RNA
aaaggtgagcgcgcttagtgta

SEQ ID NO: 15680 - RNA, 22 nt, synthetic construct
  source 1..22: mol_type = other RNA
aaagtgctcaagatctctggcg

SEQ ID NO: 15681 - RNA, 22 nt, synthetic construct
  source 1..22: mol_type = other RNA
aacagtcttggtaaccatcttg

SEQ ID NO: 15682 - RNA, 22 nt, synthetic construct
  source 1..22: mol_type = other RNA
aaccatcttggattatctttat

SEQ ID NO: 15683 - RNA, 22 nt, synthetic construct
  source 1..22: mol_type = other RNA
aagactgttgaggacgccagag

SEQ ID NO: 15684 - RNA, 22 nt, synthetic construct
  source 1..22: mol_type = other RNA
aagataatccaagatggttacc

SEQ ID NO: 15685 - RNA, 22 nt, synthetic construct
  source 1..22: mol_type = other RNA
aagatctctggcgtcctcaaca

SEQ ID NO: 15686 - RNA, 22 nt, synthetic construct
  source 1..22: mol_type = other RNA
aagatggttaccaagactgttg

SEQ ID NO: 15687 - RNA, 22 nt, synthetic construct
  source 1..22: mol_type = other RNA
aaggtgagcgcgcttagtgtat

SEQ ID NO: 15688 - RNA, 22 nt, synthetic construct
  source 1..22: mol_type = other RNA
aagtacctggcaatacactaag

SEQ ID NO: 15689 - RNA, 22 nt, synthetic construct
  source 1..22: mol_type = other RNA
aagtgctcaagatctctggcgt

SEQ ID NO: 15690 - RNA, 22 nt, synthetic construct
  source 1..22: mol_type = other RNA
aataaagataatccaagatggt

SEQ ID NO: 15691 - RNA, 22 nt, synthetic construct
  source 1..22: mol_type = other RNA
aatccaagatggttaccaagac

SEQ ID NO: 15692 - RNA, 22 nt, synthetic construct
  source 1..22: mol_type = other RNA
acagtcttggtaaccatcttgg

SEQ ID NO: 15693 - RNA, 22 nt, synthetic construct
  source 1..22: mol_type = other RNA
accaagactgttgaggacgcca

SEQ ID NO: 15694 - RNA, 22 nt, synthetic construct
  source 1..22: mol_type = other RNA
accatcttggattatctttatt

SEQ ID NO: 15695 - RNA, 22 nt, synthetic construct
  source 1..22: mol_type = other RNA
acctggcaatacactaagcgcg

SEQ ID NO: 15696 - RNA, 22 nt, synthetic construct
  source 1..22: mol_type = other RNA
acgccagagatcttgagcactt

SEQ ID NO: 15697 - RNA, 22 nt, synthetic construct
  source 1..22: mol_type = other RNA
actgttgaggacgccagagatc

SEQ ID NO: 15698 - RNA, 22 nt, synthetic construct
  source 1..22: mol_type = other RNA
acttagaaagtgctcaagatct

SEQ ID NO: 15699 - RNA, 22 nt, synthetic construct
  source 1..22: mol_type = other RNA
actttctaagtacctggcaata

SEQ ID NO: 15700 - RNA, 22 nt, synthetic construct
  source 1..22: mol_type = other RNA
agaaagtgctcaagatctctgg

SEQ ID NO: 15701 - RNA, 22 nt, synthetic construct
  source 1..22: mol_type = other RNA
agactgttgaggacgccagaga

SEQ ID NO: 15702 - RNA, 22 nt, synthetic construct
  source 1..22: mol_type = other RNA
agagatcttgagcactttctaa

SEQ ID NO: 15703 - RNA, 22 nt, synthetic construct
  source 1..22: mol_type = other RNA
agataatccaagatggttacca

SEQ ID NO: 15704 - RNA, 22 nt, synthetic construct
  source 1..22: mol_type = other RNA
agatctctggcgtcctcaacag

SEQ ID NO: 15705 - RNA, 22 nt, synthetic construct
  source 1..22: mol_type = other RNA
agatcttgagcactttctaagt

SEQ ID NO: 15706 - RNA, 22 nt, synthetic construct
  source 1..22: mol_type = other RNA
agatggttaccaagactgttga

SEQ ID NO: 15707 - RNA, 22 nt, synthetic construct
  source 1..22: mol_type = other RNA
agcactttctaagtacctggca

SEQ ID NO: 15708 - RNA, 22 nt, synthetic construct
  source 1..22: mol_type = other RNA
agcgcgcttagtgtattgccag

SEQ ID NO: 15709 - RNA, 22 nt, synthetic construct
  source 1..22: mol_type = other RNA
aggaaaaggtgagcgcgcttag

SEQ ID NO: 15710 - RNA, 22 nt, synthetic construct
  source 1..22: mol_type = other RNA
aggacgccagagatcttgagca

SEQ ID NO: 15711 - RNA, 22 nt, synthetic construct
  source 1..22: mol_type = other RNA
aggtacttagaaagtgctcaag

SEQ ID NO: 15712 - RNA, 22 nt, synthetic construct
  source 1..22: mol_type = other RNA
aggtgagcgcgcttagtgtatt

SEQ ID NO: 15713 - RNA, 22 nt, synthetic construct
  source 1..22: mol_type = other RNA
agtacctggcaatacactaagc

SEQ ID NO: 15714 - RNA, 22 nt, synthetic construct
  source 1..22: mol_type = other RNA
agtcttggtaaccatcttggat

SEQ ID NO: 15715 - RNA, 22 nt, synthetic construct
  source 1..22: mol_type = other RNA
agtgctcaagatctctggcgtc

SEQ ID NO: 15716 - RNA, 22 nt, synthetic construct
  source 1..22: mol_type = other RNA
agtgtattgccaggtacttaga

SEQ ID NO: 15717 - RNA, 22 nt, synthetic construct
  source 1..22: mol_type = other RNA
ataaagataatccaagatggtt

SEQ ID NO: 15718 - RNA, 22 nt, synthetic construct
  source 1..22: mol_type = other RNA
ataatccaagatggttaccaag

SEQ ID NO: 15719 - RNA, 22 nt, synthetic construct
  source 1..22: mol_type = other RNA
atccaagatggttaccaagact

SEQ ID NO: 15720 - RNA, 22 nt, synthetic construct
  source 1..22: mol_type = other RNA
atctctggcgtcctcaacagtc

SEQ ID NO: 15721 - RNA, 22 nt, synthetic construct
  source 1..22: mol_type = other RNA
atcttgagcactttctaagtac

SEQ ID NO: 15722 - RNA, 22 nt, synthetic construct
  source 1..22: mol_type = other RNA
atggttaccaagactgttgagg

SEQ ID NO: 15723 - RNA, 22 nt, synthetic construct
  source 1..22: mol_type = other RNA
attgccaggtacttagaaagtg

SEQ ID NO: 15724 - RNA, 22 nt, synthetic construct
  source 1..22: mol_type = other RNA
caacagtcttggtaaccatctt

SEQ ID NO: 15725 - RNA, 22 nt, synthetic construct
  source 1..22: mol_type = other RNA
caagactgttgaggacgccaga

SEQ ID NO: 15726 - RNA, 22 nt, synthetic construct
  source 1..22: mol_type = other RNA
caagatctctggcgtcctcaac

SEQ ID NO: 15727 - RNA, 22 nt, synthetic construct
  source 1..22: mol_type = other RNA
caagatggttaccaagactgtt

SEQ ID NO: 15728 - RNA, 22 nt, synthetic construct
  source 1..22: mol_type = other RNA
caatacactaagcgcgctcacc

SEQ ID NO: 15729 - RNA, 22 nt, synthetic construct
  source 1..22: mol_type = other RNA
cactttctaagtacctggcaat

SEQ ID NO: 15730 - RNA, 22 nt, synthetic construct
  source 1..22: mol_type = other RNA
cagagatcttgagcactttcta

SEQ ID NO: 15731 - RNA, 22 nt, synthetic construct
  source 1..22: mol_type = other RNA
caggtacttagaaagtgctcaa

SEQ ID NO: 15732 - RNA, 22 nt, synthetic construct
  source 1..22: mol_type = other RNA
cagtcttggtaaccatcttgga

SEQ ID NO: 15733 - RNA, 22 nt, synthetic construct
  source 1..22: mol_type = other RNA
ccaagactgttgaggacgccag

SEQ ID NO: 15734 - RNA, 22 nt, synthetic construct
  source 1..22: mol_type = other RNA
ccaagatggttaccaagactgt

SEQ ID NO: 15735 - RNA, 22 nt, synthetic construct
  source 1..22: mol_type = other RNA
ccagagatcttgagcactttct

SEQ ID NO: 15736 - RNA, 22 nt, synthetic construct
  source 1..22: mol_type = other RNA
ccaggtacttagaaagtgctca

SEQ ID NO: 15737 - RNA, 22 nt, synthetic construct
  source 1..22: mol_type = other RNA
ccatcttggattatctttatta

SEQ ID NO: 15738 - RNA, 22 nt, synthetic construct
  source 1..22: mol_type = other RNA
ccattaataaagataatccaag

SEQ ID NO: 15739 - RNA, 22 nt, synthetic construct
  source 1..22: mol_type = other RNA
cctcaacagtcttggtaaccat

SEQ ID NO: 15740 - RNA, 22 nt, synthetic construct
  source 1..22: mol_type = other RNA
cctggcaatacactaagcgcgc

SEQ ID NO: 15741 - RNA, 22 nt, synthetic construct
  source 1..22: mol_type = other RNA
cgccagagatcttgagcacttt

SEQ ID NO: 15742 - RNA, 22 nt, synthetic construct
  source 1..22: mol_type = other RNA
cgcgcttagtgtattgccaggt

SEQ ID NO: 15743 - RNA, 22 nt, synthetic construct
  source 1..22: mol_type = other RNA
cgcttagtgtattgccaggtac

SEQ ID NO: 15744 - RNA, 22 nt, synthetic construct
  source 1..22: mol_type = other RNA
cgtcctcaacagtcttggtaac

SEQ ID NO: 15745 - RNA, 22 nt, synthetic construct
  source 1..22: mol_type = other RNA
ctaagtacctggcaatacacta

SEQ ID NO: 15746 - RNA, 22 nt, synthetic construct
  source 1..22: mol_type = other RNA
ctcaacagtcttggtaaccatc

SEQ ID NO: 15747 - RNA, 22 nt, synthetic construct
  source 1..22: mol_type = other RNA
ctcaagatctctggcgtcctca

SEQ ID NO: 15748 - RNA, 22 nt, synthetic construct
  source 1..22: mol_type = other RNA
ctctggcgtcctcaacagtctt

SEQ ID NO: 15749 - RNA, 22 nt, synthetic construct
  source 1..22: mol_type = other RNA
ctggcaatacactaagcgcgct

SEQ ID NO: 15750 - RNA, 22 nt, synthetic construct
  source 1..22: mol_type = other RNA
ctggcgtcctcaacagtcttgg

SEQ ID NO: 15751 - RNA, 22 nt, synthetic construct
  source 1..22: mol_type = other RNA
ctgttgaggacgccagagatct

SEQ ID NO: 15752 - RNA, 22 nt, synthetic construct
  source 1..22: mol_type = other RNA
cttagaaagtgctcaagatctc

SEQ ID NO: 15753 - RNA, 22 nt, synthetic construct
  source 1..22: mol_type = other RNA
cttagtgtattgccaggtactt

SEQ ID NO: 15754 - RNA, 22 nt, synthetic construct
  source 1..22: mol_type = other RNA
cttgagcactttctaagtacct

SEQ ID NO: 15755 - RNA, 22 nt, synthetic construct
  source 1..22: mol_type = other RNA
cttggtaaccatcttggattat

SEQ ID NO: 15756 - RNA, 22 nt, synthetic construct
  source 1..22: mol_type = other RNA
ctttctaagtacctggcaatac

SEQ ID NO: 15757 - RNA, 22 nt, synthetic construct
  source 1..22: mol_type = other RNA
gaaaaggtgagcgcgcttagtg

SEQ ID NO: 15758 - RNA, 22 nt, synthetic construct
  source 1..22: mol_type = other RNA
gaaagtgctcaagatctctggc

SEQ ID NO: 15759 - RNA, 22 nt, synthetic construct
  source 1..22: mol_type = other RNA
gacgccagagatcttgagcact

SEQ ID NO: 15760 - RNA, 22 nt, synthetic construct
  source 1..22: mol_type = other RNA
gactgttgaggacgccagagat

SEQ ID NO: 15761 - RNA, 22 nt, synthetic construct
  source 1..22: mol_type = other RNA
gagatcttgagcactttctaag

SEQ ID NO: 15762 - RNA, 22 nt, synthetic construct
  source 1..22: mol_type = other RNA
gagcactttctaagtacctggc

SEQ ID NO: 15763 - RNA, 22 nt, synthetic construct
  source 1..22: mol_type = other RNA
gagcgcgcttagtgtattgcca

SEQ ID NO: 15764 - RNA, 22 nt, synthetic construct
  source 1..22: mol_type = other RNA
gaggaaaaggtgagcgcgctta

SEQ ID NO: 15765 - RNA, 22 nt, synthetic construct
  source 1..22: mol_type = other RNA
gaggacgccagagatcttgagc

SEQ ID NO: 15766 - RNA, 22 nt, synthetic construct
  source 1..22: mol_type = other RNA
gataatccaagatggttaccaa

SEQ ID NO: 15767 - RNA, 22 nt, synthetic construct
  source 1..22: mol_type = other RNA
gatctctggcgtcctcaacagt

SEQ ID NO: 15768 - RNA, 22 nt, synthetic construct
  source 1..22: mol_type = other RNA
gatcttgagcactttctaagta

SEQ ID NO: 15769 - RNA, 22 nt, synthetic construct
  source 1..22: mol_type = other RNA
gatggttaccaagactgttgag

SEQ ID NO: 15770 - RNA, 22 nt, synthetic construct
  source 1..22: mol_type = other RNA
gcaatacactaagcgcgctcac

SEQ ID NO: 15771 - RNA, 22 nt, synthetic construct
  source 1..22: mol_type = other RNA
gcactttctaagtacctggcaa

SEQ ID NO: 15772 - RNA, 22 nt, synthetic construct
  source 1..22: mol_type = other RNA
gccagagatcttgagcactttc

SEQ ID NO: 15773 - RNA, 22 nt, synthetic construct
  source 1..22: mol_type = other RNA
gccaggtacttagaaagtgctc

SEQ ID NO: 15774 - RNA, 22 nt, synthetic construct
  source 1..22: mol_type = other RNA
gcgcgcttagtgtattgccagg

SEQ ID NO: 15775 - RNA, 22 nt, synthetic construct
  source 1..22: mol_type = other RNA
gcgcttagtgtattgccaggta

SEQ ID NO: 15776 - RNA, 22 nt, synthetic construct
  source 1..22: mol_type = other RNA
gcgtcctcaacagtcttggtaa

SEQ ID NO: 15777 - RNA, 22 nt, synthetic construct
  source 1..22: mol_type = other RNA
gctcaagatctctggcgtcctc

SEQ ID NO: 15778 - RNA, 22 nt, synthetic construct
  source 1..22: mol_type = other RNA
gcttagtgtattgccaggtact

SEQ ID NO: 15779 - RNA, 22 nt, synthetic construct
  source 1..22: mol_type = other RNA
ggaaaaggtgagcgcgcttagt

SEQ ID NO: 15780 - RNA, 22 nt, synthetic construct
  source 1..22: mol_type = other RNA
ggacgccagagatcttgagcac

SEQ ID NO: 15781 - RNA, 22 nt, synthetic construct
  source 1..22: mol_type = other RNA
ggcaatacactaagcgcgctca

SEQ ID NO: 15782 - RNA, 22 nt, synthetic construct
  source 1..22: mol_type = other RNA
ggcgtcctcaacagtcttggta

SEQ ID NO: 15783 - RNA, 22 nt, synthetic construct
  source 1..22: mol_type = other RNA
ggtaaccatcttggattatctt

SEQ ID NO: 15784 - RNA, 22 nt, synthetic construct
  source 1..22: mol_type = other RNA
ggtacttagaaagtgctcaaga

SEQ ID NO: 15785 - RNA, 22 nt, synthetic construct
  source 1..22: mol_type = other RNA
ggtgagcgcgcttagtgtattg

SEQ ID NO: 15786 - RNA, 22 nt, synthetic construct
  source 1..22: mol_type = other RNA
ggttaccaagactgttgaggac

SEQ ID NO: 15787 - RNA, 22 nt, synthetic construct
  source 1..22: mol_type = other RNA
gtaaccatcttggattatcttt

SEQ ID NO: 15788 - RNA, 22 nt, synthetic construct
  source 1..22: mol_type = other RNA
gtacctggcaatacactaagcg

SEQ ID NO: 15789 - RNA, 22 nt, synthetic construct
  source 1..22: mol_type = other RNA
gtacttagaaagtgctcaagat

SEQ ID NO: 15790 - RNA, 22 nt, synthetic construct
  source 1..22: mol_type = other RNA
gtattgccaggtacttagaaag

SEQ ID NO: 15791 - RNA, 22 nt, synthetic construct
  source 1..22: mol_type = other RNA
gtcctcaacagtcttggtaacc

SEQ ID NO: 15792 - RNA, 22 nt, synthetic construct
  source 1..22: mol_type = other RNA
gtcttggtaaccatcttggatt

SEQ ID NO: 15793 - RNA, 22 nt, synthetic construct
  source 1..22: mol_type = other RNA
gtgagcgcgcttagtgtattgc

SEQ ID NO: 15794 - RNA, 22 nt, synthetic construct
  source 1..22: mol_type = other RNA
gtgctcaagatctctggcgtcc

SEQ ID NO: 15795 - RNA, 22 nt, synthetic construct
  source 1..22: mol_type = other RNA
gtgtattgccaggtacttagaa

SEQ ID NO: 15796 - RNA, 22 nt, synthetic construct
  source 1..22: mol_type = other RNA
gttaccaagactgttgaggacg

SEQ ID NO: 15797 - RNA, 22 nt, synthetic construct
  source 1..22: mol_type = other RNA
gttgaggacgccagagatcttg

SEQ ID NO: 15798 - RNA, 22 nt, synthetic construct
  source 1..22: mol_type = other RNA
taaagataatccaagatggtta

SEQ ID NO: 15799 - RNA, 22 nt, synthetic construct
  source 1..22: mol_type = other RNA
taaccatcttggattatcttta

SEQ ID NO: 15800 - RNA, 22 nt, synthetic construct
  source 1..22: mol_type = other RNA
taagtacctggcaatacactaa

SEQ ID NO: 15801 - RNA, 22 nt, synthetic construct
  source 1..22: mol_type = other RNA
taataaagataatccaagatgg

SEQ ID NO: 15802 - RNA, 22 nt, synthetic construct
  source 1..22: mol_type = other RNA
taatccaagatggttaccaaga

SEQ ID NO: 15803 - RNA, 22 nt, synthetic construct
  source 1..22: mol_type = other RNA
taccaagactgttgaggacgcc

SEQ ID NO: 15804 - RNA, 22 nt, synthetic construct
  source 1..22: mol_type = other RNA
tacctggcaatacactaagcgc

SEQ ID NO: 15805 - RNA, 22 nt, synthetic construct
  source 1..22: mol_type = other RNA
tacttagaaagtgctcaagatc

SEQ ID NO: 15806 - RNA, 22 nt, synthetic construct
  source 1..22: mol_type = other RNA
tagaaagtgctcaagatctctg

SEQ ID NO: 15807 - RNA, 22 nt, synthetic construct
  source 1..22: mol_type = other RNA
tagtgtattgccaggtacttag

SEQ ID NO: 15808 - RNA, 22 nt, synthetic construct
  source 1..22: mol_type = other RNA
tattgccaggtacttagaaagt

SEQ ID NO: 15809 - RNA, 22 nt, synthetic construct
  source 1..22: mol_type = other RNA
tcaacagtcttggtaaccatct

SEQ ID NO: 15810 - RNA, 22 nt, synthetic construct
  source 1..22: mol_type = other RNA
tcaagatctctggcgtcctcaa

SEQ ID NO: 15811 - RNA, 22 nt, synthetic construct
  source 1..22: mol_type = other RNA
tccaagatggttaccaagactg

SEQ ID NO: 15812 - RNA, 22 nt, synthetic construct
  source 1..22: mol_type = other RNA
tcctcaacagtcttggtaacca

SEQ ID NO: 15813 - RNA, 22 nt, synthetic construct
  source 1..22: mol_type = other RNA
tctaagtacctggcaatacact

SEQ ID NO: 15814 - RNA, 22 nt, synthetic construct
  source 1..22: mol_type = other RNA
tctctggcgtcctcaacagtct

SEQ ID NO: 15815 - RNA, 22 nt, synthetic construct
  source 1..22: mol_type = other RNA
tctggcgtcctcaacagtcttg

SEQ ID NO: 15816 - RNA, 22 nt, synthetic construct
  source 1..22: mol_type = other RNA
tcttgagcactttctaagtacc

SEQ ID NO: 15817 - RNA, 22 nt, synthetic construct
  source 1..22: mol_type = other RNA
tcttggtaaccatcttggatta

SEQ ID NO: 15818 - RNA, 22 nt, synthetic construct
  source 1..22: mol_type = other RNA
tgagcactttctaagtacctgg

SEQ ID NO: 15819 - RNA, 22 nt, synthetic construct
  source 1..22: mol_type = other RNA
tgagcgcgcttagtgtattgcc

SEQ ID NO: 15820 - RNA, 22 nt, synthetic construct
  source 1..22: mol_type = other RNA
tgaggacgccagagatcttgag

SEQ ID NO: 15821 - RNA, 22 nt, synthetic construct
  source 1..22: mol_type = other RNA
tgccaggtacttagaaagtgct

SEQ ID NO: 15822 - RNA, 22 nt, synthetic construct
  source 1..22: mol_type = other RNA
tgctcaagatctctggcgtcct

SEQ ID NO: 15823 - RNA, 22 nt, synthetic construct
  source 1..22: mol_type = other RNA
tggcaatacactaagcgcgctc

SEQ ID NO: 15824 - RNA, 22 nt, synthetic construct
  source 1..22: mol_type = other RNA
tggcgtcctcaacagtcttggt

SEQ ID NO: 15825 - RNA, 22 nt, synthetic construct
  source 1..22: mol_type = other RNA
tggtaaccatcttggattatct

SEQ ID NO: 15826 - RNA, 22 nt, synthetic construct
  source 1..22: mol_type = other RNA
tggttaccaagactgttgagga

SEQ ID NO: 15827 - RNA, 22 nt, synthetic construct
  source 1..22: mol_type = other RNA
tgtattgccaggtacttagaaa

SEQ ID NO: 15828 - RNA, 22 nt, synthetic construct
  source 1..22: mol_type = other RNA
tgttgaggacgccagagatctt

SEQ ID NO: 15829 - RNA, 22 nt, synthetic construct
  source 1..22: mol_type = other RNA
ttaccaagactgttgaggacgc

SEQ ID NO: 15830 - RNA, 22 nt, synthetic construct
  source 1..22: mol_type = other RNA
ttagaaagtgctcaagatctct

SEQ ID NO: 15831 - RNA, 22 nt, synthetic construct
  source 1..22: mol_type = other RNA
ttagtgtattgccaggtactta

SEQ ID NO: 15832 - RNA, 22 nt, synthetic construct
  source 1..22: mol_type = other RNA
ttctaagtacctggcaatacac

SEQ ID NO: 15833 - RNA, 22 nt, synthetic construct
  source 1..22: mol_type = other RNA
ttgagcactttctaagtacctg

SEQ ID NO: 15834 - RNA, 22 nt, synthetic construct
  source 1..22: mol_type = other RNA
ttgaggacgccagagatcttga

SEQ ID NO: 15835 - RNA, 22 nt, synthetic construct
  source 1..22: mol_type = other RNA
ttgccaggtacttagaaagtgc

SEQ ID NO: 15836 - RNA, 22 nt, synthetic construct
  source 1..22: mol_type = other RNA
ttggtaaccatcttggattatc

SEQ ID NO: 15837 - RNA, 22 nt, synthetic construct
  source 1..22: mol_type = other RNA
tttctaagtacctggcaataca

SEQ ID NO: 15838 - RNA, 20 nt, synthetic construct
  source 1..20: mol_type = other RNA
aaaacatgatcgaaagcaga

SEQ ID NO: 15839 - RNA, 20 nt, synthetic construct
  source 1..20: mol_type = other RNA
aaaacattctgctttcgatc

SEQ ID NO: 15840 - RNA, 20 nt, synthetic construct
  source 1..20: mol_type = other RNA
aaaatagaccttcagaggca

SEQ ID NO: 15841 - RNA, 20 nt, synthetic construct
  source 1..20: mol_type = other RNA
aaaatgacatctaacataac

SEQ ID NO: 15842 - RNA, 20 nt, synthetic construct
  source 1..20: mol_type = other RNA
aaacatgatcgaaagcagaa

SEQ ID NO: 15843 - RNA, 20 nt, synthetic construct
  source 1..20: mol_type = other RNA
aaacatgtaatgatgattgc

SEQ ID NO: 15844 - RNA, 20 nt, synthetic construct
  source 1..20: mol_type = other RNA
aaacattctgctttcgatca

SEQ ID NO: 15845 - RNA, 20 nt, synthetic construct
  source 1..20: mol_type = other RNA
aaagcagaatgttttgatca

SEQ ID NO: 15846 - RNA, 20 nt, synthetic construct
  source 1..20: mol_type = other RNA
aaagtaatacatgccatgca

SEQ ID NO: 15847 - RNA, 20 nt, synthetic construct
  source 1..20: mol_type = other RNA
aaataccagtaatggtggtg

SEQ ID NO: 15848 - RNA, 20 nt, synthetic construct
  source 1..20: mol_type = other RNA
aaatagaccttcagaggcaa

SEQ ID NO: 15849 - RNA, 20 nt, synthetic construct
  source 1..20: mol_type = other RNA
aaatgacatctaacataacc

SEQ ID NO: 15850 - RNA, 20 nt, synthetic construct
  source 1..20: mol_type = other RNA
aaatgcaattttctcatgat

SEQ ID NO: 15851 - RNA, 20 nt, synthetic construct
  source 1..20: mol_type = other RNA
aaatggtctatgcatggcat

SEQ ID NO: 15852 - RNA, 20 nt, synthetic construct
  source 1..20: mol_type = other RNA
aacataaccagcaaatacca

SEQ ID NO: 15853 - RNA, 20 nt, synthetic construct
  source 1..20: mol_type = other RNA
aacatgatcgaaagcagaat

SEQ ID NO: 15854 - RNA, 20 nt, synthetic construct
  source 1..20: mol_type = other RNA
aacatgtaatgatgattgcc

SEQ ID NO: 15855 - RNA, 20 nt, synthetic construct
  source 1..20: mol_type = other RNA
aacattctgctttcgatcat

SEQ ID NO: 15856 - RNA, 20 nt, synthetic construct
  source 1..20: mol_type = other RNA
aaccagcaaataccagtaat

SEQ ID NO: 15857 - RNA, 20 nt, synthetic construct
  source 1..20: mol_type = other RNA
aagaaacatgtaatgatgat

SEQ ID NO: 15858 - RNA, 20 nt, synthetic construct
  source 1..20: mol_type = other RNA
aagataccacaagaaacatg

SEQ ID NO: 15859 - RNA, 20 nt, synthetic construct
  source 1..20: mol_type = other RNA
aagcagaatgttttgatcat

SEQ ID NO: 15860 - RNA, 20 nt, synthetic construct
  source 1..20: mol_type = other RNA
aaggataatgtatatatcac

SEQ ID NO: 15861 - RNA, 20 nt, synthetic construct
  source 1..20: mol_type = other RNA
aagtaatacatgccatgcat

SEQ ID NO: 15862 - RNA, 20 nt, synthetic construct
  source 1..20: mol_type = other RNA
aatacatgccatgcatagac

SEQ ID NO: 15863 - RNA, 20 nt, synthetic construct
  source 1..20: mol_type = other RNA
aataccagtaatggtggtga

SEQ ID NO: 15864 - RNA, 20 nt, synthetic construct
  source 1..20: mol_type = other RNA
aatagaccttcagaggcaat

SEQ ID NO: 15865 - RNA, 20 nt, synthetic construct
  source 1..20: mol_type = other RNA
aatcatcattacatgtttct

SEQ ID NO: 15866 - RNA, 20 nt, synthetic construct
  source 1..20: mol_type = other RNA
aatgacatctaacataacca

SEQ ID NO: 15867 - RNA, 20 nt, synthetic construct
  source 1..20: mol_type = other RNA
aatgatgattgcctctgaag

SEQ ID NO: 15868 - RNA, 20 nt, synthetic construct
  source 1..20: mol_type = other RNA
aatgcaattttctcatgatc

SEQ ID NO: 15869 - RNA, 20 nt, synthetic construct
  source 1..20: mol_type = other RNA
aatggtctatgcatggcatg

SEQ ID NO: 15870 - RNA, 20 nt, synthetic construct
  source 1..20: mol_type = other RNA
aatggtggtgatatatacat

SEQ ID NO: 15871 - RNA, 20 nt, synthetic construct
  source 1..20: mol_type = other RNA
aatgtatatatcaccaccat

SEQ ID NO: 15872 - RNA, 20 nt, synthetic construct
  source 1..20: mol_type = other RNA
aatgttttgatcatgagaaa

SEQ ID NO: 15873 - RNA, 20 nt, synthetic construct
  source 1..20: mol_type = other RNA
aatttccaaagtaatacatg

SEQ ID NO: 15874 - RNA, 20 nt, synthetic construct
  source 1..20: mol_type = other RNA
aattttctcatgatcaaaac

SEQ ID NO: 15875 - RNA, 20 nt, synthetic construct
  source 1..20: mol_type = other RNA
acaacataaaggataatgta

SEQ ID NO: 15876 - RNA, 20 nt, synthetic construct
  source 1..20: mol_type = other RNA
acaagaaacatgtaatgatg

SEQ ID NO: 15877 - RNA, 20 nt, synthetic construct
  source 1..20: mol_type = other RNA
acataaccagcaaataccag

SEQ ID NO: 15878 - RNA, 20 nt, synthetic construct
  source 1..20: mol_type = other RNA
acatctaacataaccagcaa

SEQ ID NO: 15879 - RNA, 20 nt, synthetic construct
  source 1..20: mol_type = other RNA
acatgatcgaaagcagaatg

SEQ ID NO: 15880 - RNA, 20 nt, synthetic construct
  source 1..20: mol_type = other RNA
acatgccatgcatagaccat

SEQ ID NO: 15881 - RNA, 20 nt, synthetic construct
  source 1..20: mol_type = other RNA
acatgtaatgatgattgcct

SEQ ID NO: 15882 - RNA, 20 nt, synthetic construct
  source 1..20: mol_type = other RNA
acatgtttcttgtggtatct

SEQ ID NO: 15883 - RNA, 20 nt, synthetic construct
  source 1..20: mol_type = other RNA
acattatcctttatgttgta

SEQ ID NO: 15884 - RNA, 20 nt, synthetic construct
  source 1..20: mol_type = other RNA
accacaagaaacatgtaatg

SEQ ID NO: 15885 - RNA, 20 nt, synthetic construct
  source 1..20: mol_type = other RNA
accaccattactggtatttg

SEQ ID NO: 15886 - RNA, 20 nt, synthetic construct
  source 1..20: mol_type = other RNA
accagcaaataccagtaatg

SEQ ID NO: 15887 - RNA, 20 nt, synthetic construct
  source 1..20: mol_type = other RNA
accagtaatggtggtgatat

SEQ ID NO: 15888 - RNA, 20 nt, synthetic construct
  source 1..20: mol_type = other RNA
accattactggtatttgctg

SEQ ID NO: 15889 - RNA, 20 nt, synthetic construct
  source 1..20: mol_type = other RNA
accatttctggaagatacca

SEQ ID NO: 15890 - RNA, 20 nt, synthetic construct
  source 1..20: mol_type = other RNA
accttcagaggcaatcatca

SEQ ID NO: 15891 - RNA, 20 nt, synthetic construct
  source 1..20: mol_type = other RNA
actggtatttgctggttatg

SEQ ID NO: 15892 - RNA, 20 nt, synthetic construct
  source 1..20: mol_type = other RNA
agaaacatgtaatgatgatt

SEQ ID NO: 15893 - RNA, 20 nt, synthetic construct
  source 1..20: mol_type = other RNA
agaaatggtctatgcatggc

SEQ ID NO: 15894 - RNA, 20 nt, synthetic construct
  source 1..20: mol_type = other RNA
agaatgttttgatcatgaga

SEQ ID NO: 15895 - RNA, 20 nt, synthetic construct
  source 1..20: mol_type = other RNA
agaccatttctggaagatac

SEQ ID NO: 15896 - RNA, 20 nt, synthetic construct
  source 1..20: mol_type = other RNA
agaccttcagaggcaatcat

SEQ ID NO: 15897 - RNA, 20 nt, synthetic construct
  source 1..20: mol_type = other RNA
agaggcaatcatcattacat

SEQ ID NO: 15898 - RNA, 20 nt, synthetic construct
  source 1..20: mol_type = other RNA
agataccacaagaaacatgt

SEQ ID NO: 15899 - RNA, 20 nt, synthetic construct
  source 1..20: mol_type = other RNA
agcaaataccagtaatggtg

SEQ ID NO: 15900 - RNA, 20 nt, synthetic construct
  source 1..20: mol_type = other RNA
agcagaatgttttgatcatg

SEQ ID NO: 15901 - RNA, 20 nt, synthetic construct
  source 1..20: mol_type = other RNA
aggaaaatagaccttcagag

SEQ ID NO: 15902 - RNA, 20 nt, synthetic construct
  source 1..20: mol_type = other RNA
aggataatgtatatatcacc

SEQ ID NO: 15903 - RNA, 20 nt, synthetic construct
  source 1..20: mol_type = other RNA
aggcaatcatcattacatgt

SEQ ID NO: 15904 - RNA, 20 nt, synthetic construct
  source 1..20: mol_type = other RNA
agtaatacatgccatgcata

SEQ ID NO: 15905 - RNA, 20 nt, synthetic construct
  source 1..20: mol_type = other RNA
agtaatggtggtgatatata

SEQ ID NO: 15906 - RNA, 20 nt, synthetic construct
  source 1..20: mol_type = other RNA
ataaccagcaaataccagta

SEQ ID NO: 15907 - RNA, 20 nt, synthetic construct
  source 1..20: mol_type = other RNA
ataatgtatatatcaccacc

SEQ ID NO: 15908 - RNA, 20 nt, synthetic construct
  source 1..20: mol_type = other RNA
atacatgccatgcatagacc

SEQ ID NO: 15909 - RNA, 20 nt, synthetic construct
  source 1..20: mol_type = other RNA
atacattatcctttatgttg

SEQ ID NO: 15910 - RNA, 20 nt, synthetic construct
  source 1..20: mol_type = other RNA
ataccacaagaaacatgtaa

SEQ ID NO: 15911 - RNA, 20 nt, synthetic construct
  source 1..20: mol_type = other RNA
ataccagtaatggtggtgat

SEQ ID NO: 15912 - RNA, 20 nt, synthetic construct
  source 1..20: mol_type = other RNA
atagaccatttctggaagat

SEQ ID NO: 15913 - RNA, 20 nt, synthetic construct
  source 1..20: mol_type = other RNA
atagaccttcagaggcaatc

SEQ ID NO: 15914 - RNA, 20 nt, synthetic construct
  source 1..20: mol_type = other RNA
atatatcaccaccattactg

SEQ ID NO: 15915 - RNA, 20 nt, synthetic construct
  source 1..20: mol_type = other RNA
atatcaccaccattactggt

SEQ ID NO: 15916 - RNA, 20 nt, synthetic construct
  source 1..20: mol_type = other RNA
atcaaaacattctgctttcg

SEQ ID NO: 15917 - RNA, 20 nt, synthetic construct
  source 1..20: mol_type = other RNA
atcaccaccattactggtat

SEQ ID NO: 15918 - RNA, 20 nt, synthetic construct
  source 1..20: mol_type = other RNA
atcatcattacatgtttctt

SEQ ID NO: 15919 - RNA, 20 nt, synthetic construct
  source 1..20: mol_type = other RNA
atcatgagaaaattgcattt

SEQ ID NO: 15920 - RNA, 20 nt, synthetic construct
  source 1..20: mol_type = other RNA
atcattacatgtttcttgtg

SEQ ID NO: 15921 - RNA, 20 nt, synthetic construct
  source 1..20: mol_type = other RNA
atcgaaagcagaatgttttg

SEQ ID NO: 15922 - RNA, 20 nt, synthetic construct
  source 1..20: mol_type = other RNA
atctaacataaccagcaaat

SEQ ID NO: 15923 - RNA, 20 nt, synthetic construct
  source 1..20: mol_type = other RNA
atcttccagaaatggtctat

SEQ ID NO: 15924 - RNA, 20 nt, synthetic construct
  source 1..20: mol_type = other RNA
atgacatctaacataaccag

SEQ ID NO: 15925 - RNA, 20 nt, synthetic construct
  source 1..20: mol_type = other RNA
atgatcaaaacattctgctt

SEQ ID NO: 15926 - RNA, 20 nt, synthetic construct
  source 1..20: mol_type = other RNA
atgatcgaaagcagaatgtt

SEQ ID NO: 15927 - RNA, 20 nt, synthetic construct
  source 1..20: mol_type = other RNA
atgatgattgcctctgaagg

SEQ ID NO: 15928 - RNA, 20 nt, synthetic construct
  source 1..20: mol_type = other RNA
atgattgcctctgaaggtct

SEQ ID NO: 15929 - RNA, 20 nt, synthetic construct
  source 1..20: mol_type = other RNA
atgcaattttctcatgatca

SEQ ID NO: 15930 - RNA, 20 nt, synthetic construct
  source 1..20: mol_type = other RNA
atgcatagaccatttctgga

SEQ ID NO: 15931 - RNA, 20 nt, synthetic construct
  source 1..20: mol_type = other RNA
atgcatggcatgtattactt

SEQ ID NO: 15932 - RNA, 20 nt, synthetic construct
  source 1..20: mol_type = other RNA
atgccatgcatagaccattt

SEQ ID NO: 15933 - RNA, 20 nt, synthetic construct
  source 1..20: mol_type = other RNA
atggcatgtattactttgga

SEQ ID NO: 15934 - RNA, 20 nt, synthetic construct
  source 1..20: mol_type = other RNA
atggtctatgcatggcatgt

SEQ ID NO: 15935 - RNA, 20 nt, synthetic construct
  source 1..20: mol_type = other RNA
atggtggtgatatatacatt

SEQ ID NO: 15936 - RNA, 20 nt, synthetic construct
  source 1..20: mol_type = other RNA
atgtaatgatgattgcctct

SEQ ID NO: 15937 - RNA, 20 nt, synthetic construct
  source 1..20: mol_type = other RNA
atgtatatatcaccaccatt

SEQ ID NO: 15938 - RNA, 20 nt, synthetic construct
  source 1..20: mol_type = other RNA
atgtttcttgtggtatcttc

SEQ ID NO: 15939 - RNA, 20 nt, synthetic construct
  source 1..20: mol_type = other RNA
atgttttgatcatgagaaaa

SEQ ID NO: 15940 - RNA, 20 nt, synthetic construct
  source 1..20: mol_type = other RNA
attacatgtttcttgtggta

SEQ ID NO: 15941 - RNA, 20 nt, synthetic construct
  source 1..20: mol_type = other RNA
attactggtatttgctggtt

SEQ ID NO: 15942 - RNA, 20 nt, synthetic construct
  source 1..20: mol_type = other RNA
atttccaaagtaatacatgc

SEQ ID NO: 15943 - RNA, 20 nt, synthetic construct
  source 1..20: mol_type = other RNA
atttctggaagataccacaa

SEQ ID NO: 15944 - RNA, 20 nt, synthetic construct
  source 1..20: mol_type = other RNA
atttgctggttatgttagat

SEQ ID NO: 15945 - RNA, 20 nt, synthetic construct
  source 1..20: mol_type = other RNA
attttctcatgatcaaaaca

SEQ ID NO: 15946 - RNA, 20 nt, synthetic construct
  source 1..20: mol_type = other RNA
caaaacatgatcgaaagcag

SEQ ID NO: 15947 - RNA, 20 nt, synthetic construct
  source 1..20: mol_type = other RNA
caaaacattctgctttcgat

SEQ ID NO: 15948 - RNA, 20 nt, synthetic construct
  source 1..20: mol_type = other RNA
caaagtaatacatgccatgc

SEQ ID NO: 15949 - RNA, 20 nt, synthetic construct
  source 1..20: mol_type = other RNA
caaataccagtaatggtggt

SEQ ID NO: 15950 - RNA, 20 nt, synthetic construct
  source 1..20: mol_type = other RNA
caacataaaggataatgtat

SEQ ID NO: 15951 - RNA, 20 nt, synthetic construct
  source 1..20: mol_type = other RNA
caagaaacatgtaatgatga

SEQ ID NO: 15952 - RNA, 20 nt, synthetic construct
  source 1..20: mol_type = other RNA
caatcatcattacatgtttc

SEQ ID NO: 15953 - RNA, 20 nt, synthetic construct
  source 1..20: mol_type = other RNA
caattttctcatgatcaaaa

SEQ ID NO: 15954 - RNA, 20 nt, synthetic construct
  source 1..20: mol_type = other RNA
cacaagaaacatgtaatgat

SEQ ID NO: 15955 - RNA, 20 nt, synthetic construct
  source 1..20: mol_type = other RNA
caccaccattactggtattt

SEQ ID NO: 15956 - RNA, 20 nt, synthetic construct
  source 1..20: mol_type = other RNA
caccattactggtatttgct

SEQ ID NO: 15957 - RNA, 20 nt, synthetic construct
  source 1..20: mol_type = other RNA
cagaaatggtctatgcatgg

SEQ ID NO: 15958 - RNA, 20 nt, synthetic construct
  source 1..20: mol_type = other RNA
cagaatgttttgatcatgag

SEQ ID NO: 15959 - RNA, 20 nt, synthetic construct
  source 1..20: mol_type = other RNA
cagaggcaatcatcattaca

SEQ ID NO: 15960 - RNA, 20 nt, synthetic construct
  source 1..20: mol_type = other RNA
cagcaaataccagtaatggt

SEQ ID NO: 15961 - RNA, 20 nt, synthetic construct
  source 1..20: mol_type = other RNA
cagtaatggtggtgatatat

SEQ ID NO: 15962 - RNA, 20 nt, synthetic construct
  source 1..20: mol_type = other RNA
cataaccagcaaataccagt

SEQ ID NO: 15963 - RNA, 20 nt, synthetic construct
  source 1..20: mol_type = other RNA
catagaccatttctggaaga

SEQ ID NO: 15964 - RNA, 20 nt, synthetic construct
  source 1..20: mol_type = other RNA
catcattacatgtttcttgt

SEQ ID NO: 15965 - RNA, 20 nt, synthetic construct
  source 1..20: mol_type = other RNA
catctaacataaccagcaaa

SEQ ID NO: 15966 - RNA, 20 nt, synthetic construct
  source 1..20: mol_type = other RNA
catgagaaaattgcatttaa

SEQ ID NO: 15967 - RNA, 20 nt, synthetic construct
  source 1..20: mol_type = other RNA
catgatcaaaacattctgct

SEQ ID NO: 15968 - RNA, 20 nt, synthetic construct
  source 1..20: mol_type = other RNA
catgatcgaaagcagaatgt

SEQ ID NO: 15969 - RNA, 20 nt, synthetic construct
  source 1..20: mol_type = other RNA
catgcatagaccatttctgg

SEQ ID NO: 15970 - RNA, 20 nt, synthetic construct
  source 1..20: mol_type = other RNA
catgccatgcatagaccatt

SEQ ID NO: 15971 - RNA, 20 nt, synthetic construct
  source 1..20: mol_type = other RNA
catggcatgtattactttgg

SEQ ID NO: 15972 - RNA, 20 nt, synthetic construct
  source 1..20: mol_type = other RNA
catgtaatgatgattgcctc

SEQ ID NO: 15973 - RNA, 20 nt, synthetic construct
  source 1..20: mol_type = other RNA
catgtattactttggaaatt

SEQ ID NO: 15974 - RNA, 20 nt, synthetic construct
  source 1..20: mol_type = other RNA
catgtttcttgtggtatctt

SEQ ID NO: 15975 - RNA, 20 nt, synthetic construct
  source 1..20: mol_type = other RNA
cattacatgtttcttgtggt

SEQ ID NO: 15976 - RNA, 20 nt, synthetic construct
  source 1..20: mol_type = other RNA
cattactggtatttgctggt

SEQ ID NO: 15977 - RNA, 20 nt, synthetic construct
  source 1..20: mol_type = other RNA
cattatcctttatgttgtaa

SEQ ID NO: 15978 - RNA, 20 nt, synthetic construct
  source 1..20: mol_type = other RNA
catttctggaagataccaca

SEQ ID NO: 15979 - RNA, 20 nt, synthetic construct
  source 1..20: mol_type = other RNA
ccaaagtaatacatgccatg

SEQ ID NO: 15980 - RNA, 20 nt, synthetic construct
  source 1..20: mol_type = other RNA
ccacaagaaacatgtaatga

SEQ ID NO: 15981 - RNA, 20 nt, synthetic construct
  source 1..20: mol_type = other RNA
ccaccattactggtatttgc

SEQ ID NO: 15982 - RNA, 20 nt, synthetic construct
  source 1..20: mol_type = other RNA
ccagaaatggtctatgcatg

SEQ ID NO: 15983 - RNA, 20 nt, synthetic construct
  source 1..20: mol_type = other RNA
ccagcaaataccagtaatgg

SEQ ID NO: 15984 - RNA, 20 nt, synthetic construct
  source 1..20: mol_type = other RNA
ccagtaatggtggtgatata

SEQ ID NO: 15985 - RNA, 20 nt, synthetic construct
  source 1..20: mol_type = other RNA
ccatgcatagaccatttctg

SEQ ID NO: 15986 - RNA, 20 nt, synthetic construct
  source 1..20: mol_type = other RNA
ccattactggtatttgctgg

SEQ ID NO: 15987 - RNA, 20 nt, synthetic construct
  source 1..20: mol_type = other RNA
ccatttctggaagataccac

SEQ ID NO: 15988 - RNA, 20 nt, synthetic construct
  source 1..20: mol_type = other RNA
ccttcagaggcaatcatcat

SEQ ID NO: 15989 - RNA, 20 nt, synthetic construct
  source 1..20: mol_type = other RNA
cgaaagcagaatgttttgat

SEQ ID NO: 15990 - RNA, 20 nt, synthetic construct
  source 1..20: mol_type = other RNA
ctaacataaccagcaaatac

SEQ ID NO: 15991 - RNA, 20 nt, synthetic construct
  source 1..20: mol_type = other RNA
ctatgcatggcatgtattac

SEQ ID NO: 15992 - RNA, 20 nt, synthetic construct
  source 1..20: mol_type = other RNA
ctcatgatcaaaacattctg

SEQ ID NO: 15993 - RNA, 20 nt, synthetic construct
  source 1..20: mol_type = other RNA
ctggaagataccacaagaaa

SEQ ID NO: 15994 - RNA, 20 nt, synthetic construct
  source 1..20: mol_type = other RNA
ctggtatttgctggttatgt

SEQ ID NO: 15995 - RNA, 20 nt, synthetic construct
  source 1..20: mol_type = other RNA
ctggttatgttagatgtcat

SEQ ID NO: 15996 - RNA, 20 nt, synthetic construct
  source 1..20: mol_type = other RNA
cttcagaggcaatcatcatt

SEQ ID NO: 15997 - RNA, 20 nt, synthetic construct
  source 1..20: mol_type = other RNA
cttccagaaatggtctatgc

SEQ ID NO: 15998 - RNA, 20 nt, synthetic construct
  source 1..20: mol_type = other RNA
cttgtggtatcttccagaaa

SEQ ID NO: 15999 - RNA, 20 nt, synthetic construct
  source 1..20: mol_type = other RNA
gaaaatagaccttcagaggc

SEQ ID NO: 16000 - RNA, 20 nt, synthetic construct
  source 1..20: mol_type = other RNA
gaaaatttccaaagtaatac

SEQ ID NO: 16001 - RNA, 20 nt, synthetic construct
  source 1..20: mol_type = other RNA
gaaacatgtaatgatgattg

SEQ ID NO: 16002 - RNA, 20 nt, synthetic construct
  source 1..20: mol_type = other RNA
gaaagcagaatgttttgatc

SEQ ID NO: 16003 - RNA, 20 nt, synthetic construct
  source 1..20: mol_type = other RNA
gaaatggtctatgcatggca

SEQ ID NO: 16004 - RNA, 20 nt, synthetic construct
  source 1..20: mol_type = other RNA
gaagataccacaagaaacat

SEQ ID NO: 16005 - RNA, 20 nt, synthetic construct
  source 1..20: mol_type = other RNA
gaatgttttgatcatgagaa

SEQ ID NO: 16006 - RNA, 20 nt, synthetic construct
  source 1..20: mol_type = other RNA
gacatctaacataaccagca

SEQ ID NO: 16007 - RNA, 20 nt, synthetic construct
  source 1..20: mol_type = other RNA
gaccatttctggaagatacc

SEQ ID NO: 16008 - RNA, 20 nt, synthetic construct
  source 1..20: mol_type = other RNA
gaccttcagaggcaatcatc

SEQ ID NO: 16009 - RNA, 20 nt, synthetic construct
  source 1..20: mol_type = other RNA
gaggaaaatagaccttcaga

SEQ ID NO: 16010 - RNA, 20 nt, synthetic construct
  source 1..20: mol_type = other RNA
gaggcaatcatcattacatg

SEQ ID NO: 16011 - RNA, 20 nt, synthetic construct
  source 1..20: mol_type = other RNA
gataatgtatatatcaccac

SEQ ID NO: 16012 - RNA, 20 nt, synthetic construct
  source 1..20: mol_type = other RNA
gataccacaagaaacatgta

SEQ ID NO: 16013 - RNA, 20 nt, synthetic construct
  source 1..20: mol_type = other RNA
gatcaaaacattctgctttc

SEQ ID NO: 16014 - RNA, 20 nt, synthetic construct
  source 1..20: mol_type = other RNA
gatcatgagaaaattgcatt

SEQ ID NO: 16015 - RNA, 20 nt, synthetic construct
  source 1..20: mol_type = other RNA
gatcgaaagcagaatgtttt

SEQ ID NO: 16016 - RNA, 20 nt, synthetic construct
  source 1..20: mol_type = other RNA
gatgattgcctctgaaggtc

SEQ ID NO: 16017 - RNA, 20 nt, synthetic construct
  source 1..20: mol_type = other RNA
gcaaaacatgatcgaaagca

SEQ ID NO: 16018 - RNA, 20 nt, synthetic construct
  source 1..20: mol_type = other RNA
gcaaataccagtaatggtgg

SEQ ID NO: 16019 - RNA, 20 nt, synthetic construct
  source 1..20: mol_type = other RNA
gcaatcatcattacatgttt

SEQ ID NO: 16020 - RNA, 20 nt, synthetic construct
  source 1..20: mol_type = other RNA
gcaattttctcatgatcaaa

SEQ ID NO: 16021 - RNA, 20 nt, synthetic construct
  source 1..20: mol_type = other RNA
gcagaatgttttgatcatga

SEQ ID NO: 16022 - RNA, 20 nt, synthetic construct
  source 1..20: mol_type = other RNA
gcatagaccatttctggaag

SEQ ID NO: 16023 - RNA, 20 nt, synthetic construct
  source 1..20: mol_type = other RNA
gcatggcatgtattactttg

SEQ ID NO: 16024 - RNA, 20 nt, synthetic construct
  source 1..20: mol_type = other RNA
gcatgtattactttggaaat

SEQ ID NO: 16025 - RNA, 20 nt, synthetic construct
  source 1..20: mol_type = other RNA
gccatgcatagaccatttct

SEQ ID NO: 16026 - RNA, 20 nt, synthetic construct
  source 1..20: mol_type = other RNA
gctggttatgttagatgtca

SEQ ID NO: 16027 - RNA, 20 nt, synthetic construct
  source 1..20: mol_type = other RNA
ggaaaatagaccttcagagg

SEQ ID NO: 16028 - RNA, 20 nt, synthetic construct
  source 1..20: mol_type = other RNA
ggaagataccacaagaaaca

SEQ ID NO: 16029 - RNA, 20 nt, synthetic construct
  source 1..20: mol_type = other RNA
ggataatgtatatatcacca

SEQ ID NO: 16030 - RNA, 20 nt, synthetic construct
  source 1..20: mol_type = other RNA
ggcaaaacatgatcgaaagc

SEQ ID NO: 16031 - RNA, 20 nt, synthetic construct
  source 1..20: mol_type = other RNA
ggcaatcatcattacatgtt

SEQ ID NO: 16032 - RNA, 20 nt, synthetic construct
  source 1..20: mol_type = other RNA
ggcatgtattactttggaaa

SEQ ID NO: 16033 - RNA, 20 nt, synthetic construct
  source 1..20: mol_type = other RNA
ggtatcttccagaaatggtc

SEQ ID NO: 16034 - RNA, 20 nt, synthetic construct
  source 1..20: mol_type = other RNA
ggtatttgctggttatgtta

SEQ ID NO: 16035 - RNA, 20 nt, synthetic construct
  source 1..20: mol_type = other RNA
ggtctatgcatggcatgtat

SEQ ID NO: 16036 - RNA, 20 nt, synthetic construct
  source 1..20: mol_type = other RNA
ggtgatatatacattatcct

SEQ ID NO: 16037 - RNA, 20 nt, synthetic construct
  source 1..20: mol_type = other RNA
ggtggtgatatatacattat

SEQ ID NO: 16038 - RNA, 20 nt, synthetic construct
  source 1..20: mol_type = other RNA
ggttatgttagatgtcattt

SEQ ID NO: 16039 - RNA, 20 nt, synthetic construct
  source 1..20: mol_type = other RNA
gtaatacatgccatgcatag

SEQ ID NO: 16040 - RNA, 20 nt, synthetic construct
  source 1..20: mol_type = other RNA
gtaatgatgattgcctctga

SEQ ID NO: 16041 - RNA, 20 nt, synthetic construct
  source 1..20: mol_type = other RNA
gtaatggtggtgatatatac

SEQ ID NO: 16042 - RNA, 20 nt, synthetic construct
  source 1..20: mol_type = other RNA
gtatatatcaccaccattac

SEQ ID NO: 16043 - RNA, 20 nt, synthetic construct
  source 1..20: mol_type = other RNA
gtatcttccagaaatggtct

SEQ ID NO: 16044 - RNA, 20 nt, synthetic construct
  source 1..20: mol_type = other RNA
gtattactttggaaattttc

SEQ ID NO: 16045 - RNA, 20 nt, synthetic construct
  source 1..20: mol_type = other RNA
gtatttgctggttatgttag

SEQ ID NO: 16046 - RNA, 20 nt, synthetic construct
  source 1..20: mol_type = other RNA
gtctatgcatggcatgtatt

SEQ ID NO: 16047 - RNA, 20 nt, synthetic construct
  source 1..20: mol_type = other RNA
gtgatatatacattatcctt

SEQ ID NO: 16048 - RNA, 20 nt, synthetic construct
  source 1..20: mol_type = other RNA
gtggtatcttccagaaatgg

SEQ ID NO: 16049 - RNA, 20 nt, synthetic construct
  source 1..20: mol_type = other RNA
gtggtgatatatacattatc

SEQ ID NO: 16050 - RNA, 20 nt, synthetic construct
  source 1..20: mol_type = other RNA
gttatgttagatgtcatttt

SEQ ID NO: 16051 - RNA, 20 nt, synthetic construct
  source 1..20: mol_type = other RNA
gtttcttgtggtatcttcca

SEQ ID NO: 16052 - RNA, 20 nt, synthetic construct
  source 1..20: mol_type = other RNA
gttttgatcatgagaaaatt

SEQ ID NO: 16053 - RNA, 20 nt, synthetic construct
  source 1..20: mol_type = other RNA
taaatgcaattttctcatga

SEQ ID NO: 16054 - RNA, 20 nt, synthetic construct
  source 1..20: mol_type = other RNA
taacataaccagcaaatacc

SEQ ID NO: 16055 - RNA, 20 nt, synthetic construct
  source 1..20: mol_type = other RNA
taaccagcaaataccagtaa

SEQ ID NO: 16056 - RNA, 20 nt, synthetic construct
  source 1..20: mol_type = other RNA
taatacatgccatgcataga

SEQ ID NO: 16057 - RNA, 20 nt, synthetic construct
  source 1..20: mol_type = other RNA
taatgatgattgcctctgaa

SEQ ID NO: 16058 - RNA, 20 nt, synthetic construct
  source 1..20: mol_type = other RNA
taatggtggtgatatataca

SEQ ID NO: 16059 - RNA, 20 nt, synthetic construct
  source 1..20: mol_type = other RNA
taatgtatatatcaccacca

SEQ ID NO: 16060 - RNA, 20 nt, synthetic construct
  source 1..20: mol_type = other RNA
tacaacataaaggataatgt

SEQ ID NO: 16061 - RNA, 20 nt, synthetic construct
  source 1..20: mol_type = other RNA
tacatgccatgcatagacca

SEQ ID NO: 16062 - RNA, 20 nt, synthetic construct
  source 1..20: mol_type = other RNA
tacatgtttcttgtggtatc

SEQ ID NO: 16063 - RNA, 20 nt, synthetic construct
  source 1..20: mol_type = other RNA
tacattatcctttatgttgt

SEQ ID NO: 16064 - RNA, 20 nt, synthetic construct
  source 1..20: mol_type = other RNA
taccacaagaaacatgtaat

SEQ ID NO: 16065 - RNA, 20 nt, synthetic construct
  source 1..20: mol_type = other RNA
taccagtaatggtggtgata

SEQ ID NO: 16066 - RNA, 20 nt, synthetic construct
  source 1..20: mol_type = other RNA
tactggtatttgctggttat

SEQ ID NO: 16067 - RNA, 20 nt, synthetic construct
  source 1..20: mol_type = other RNA
tagaccatttctggaagata

SEQ ID NO: 16068 - RNA, 20 nt, synthetic construct
  source 1..20: mol_type = other RNA
tagaccttcagaggcaatca

SEQ ID NO: 16069 - RNA, 20 nt, synthetic construct
  source 1..20: mol_type = other RNA
tatatatcaccaccattact

SEQ ID NO: 16070 - RNA, 20 nt, synthetic construct
  source 1..20: mol_type = other RNA
tatatcaccaccattactgg

SEQ ID NO: 16071 - RNA, 20 nt, synthetic construct
  source 1..20: mol_type = other RNA
tatcaccaccattactggta

SEQ ID NO: 16072 - RNA, 20 nt, synthetic construct
  source 1..20: mol_type = other RNA
tatcttccagaaatggtcta

SEQ ID NO: 16073 - RNA, 20 nt, synthetic construct
  source 1..20: mol_type = other RNA
tatgcatggcatgtattact

SEQ ID NO: 16074 - RNA, 20 nt, synthetic construct
  source 1..20: mol_type = other RNA
tatttgctggttatgttaga

SEQ ID NO: 16075 - RNA, 20 nt, synthetic construct
  source 1..20: mol_type = other RNA
tcaaaacattctgctttcga

SEQ ID NO: 16076 - RNA, 20 nt, synthetic construct
  source 1..20: mol_type = other RNA
tcaccaccattactggtatt

SEQ ID NO: 16077 - RNA, 20 nt, synthetic construct
  source 1..20: mol_type = other RNA
tcagaggcaatcatcattac

SEQ ID NO: 16078 - RNA, 20 nt, synthetic construct
  source 1..20: mol_type = other RNA
tcatcattacatgtttcttg

SEQ ID NO: 16079 - RNA, 20 nt, synthetic construct
  source 1..20: mol_type = other RNA
tcatgagaaaattgcattta

SEQ ID NO: 16080 - RNA, 20 nt, synthetic construct
  source 1..20: mol_type = other RNA
tcatgatcaaaacattctgc

SEQ ID NO: 16081 - RNA, 20 nt, synthetic construct
  source 1..20: mol_type = other RNA
tcattacatgtttcttgtgg

SEQ ID NO: 16082 - RNA, 20 nt, synthetic construct
  source 1..20: mol_type = other RNA
tccaaagtaatacatgccat

SEQ ID NO: 16083 - RNA, 20 nt, synthetic construct
  source 1..20: mol_type = other RNA
tccagaaatggtctatgcat

SEQ ID NO: 16084 - RNA, 20 nt, synthetic construct
  source 1..20: mol_type = other RNA
tcgaaagcagaatgttttga

SEQ ID NO: 16085 - RNA, 20 nt, synthetic construct
  source 1..20: mol_type = other RNA
tctaacataaccagcaaata

SEQ ID NO: 16086 - RNA, 20 nt, synthetic construct
  source 1..20: mol_type = other RNA
tctatgcatggcatgtatta

SEQ ID NO: 16087 - RNA, 20 nt, synthetic construct
  source 1..20: mol_type = other RNA
tctcatgatcaaaacattct

SEQ ID NO: 16088 - RNA, 20 nt, synthetic construct
  source 1..20: mol_type = other RNA
tctggaagataccacaagaa

SEQ ID NO: 16089 - RNA, 20 nt, synthetic construct
  source 1..20: mol_type = other RNA
tcttccagaaatggtctatg

SEQ ID NO: 16090 - RNA, 20 nt, synthetic construct
  source 1..20: mol_type = other RNA
tcttgtggtatcttccagaa

SEQ ID NO: 16091 - RNA, 20 nt, synthetic construct
  source 1..20: mol_type = other RNA
tgacatctaacataaccagc

SEQ ID NO: 16092 - RNA, 20 nt, synthetic construct
  source 1..20: mol_type = other RNA
tgatcaaaacattctgcttt

SEQ ID NO: 16093 - RNA, 20 nt, synthetic construct
  source 1..20: mol_type = other RNA
tgatcatgagaaaattgcat

SEQ ID NO: 16094 - RNA, 20 nt, synthetic construct
  source 1..20: mol_type = other RNA
tgatcgaaagcagaatgttt

SEQ ID NO: 16095 - RNA, 20 nt, synthetic construct
  source 1..20: mol_type = other RNA
tgatgattgcctctgaaggt

SEQ ID NO: 16096 - RNA, 20 nt, synthetic construct
  source 1..20: mol_type = other RNA
tgattgcctctgaaggtcta

SEQ ID NO: 16097 - RNA, 20 nt, synthetic construct
  source 1..20: mol_type = other RNA
tgcaattttctcatgatcaa

SEQ ID NO: 16098 - RNA, 20 nt, synthetic construct
  source 1..20: mol_type = other RNA
tgcatagaccatttctggaa

SEQ ID NO: 16099 - RNA, 20 nt, synthetic construct
  source 1..20: mol_type = other RNA
tgcatggcatgtattacttt

SEQ ID NO: 16100 - RNA, 20 nt, synthetic construct
  source 1..20: mol_type = other RNA
tgccatgcatagaccatttc

SEQ ID NO: 16101 - RNA, 20 nt, synthetic construct
  source 1..20: mol_type = other RNA
tgctggttatgttagatgtc

SEQ ID NO: 16102 - RNA, 20 nt, synthetic construct
  source 1..20: mol_type = other RNA
tggaagataccacaagaaac

SEQ ID NO: 16103 - RNA, 20 nt, synthetic construct
  source 1..20: mol_type = other RNA
tggcatgtattactttggaa

SEQ ID NO: 16104 - RNA, 20 nt, synthetic construct
  source 1..20: mol_type = other RNA
tggtatcttccagaaatggt

SEQ ID NO: 16105 - RNA, 20 nt, synthetic construct
  source 1..20: mol_type = other RNA
tggtatttgctggttatgtt

SEQ ID NO: 16106 - RNA, 20 nt, synthetic construct
  source 1..20: mol_type = other RNA
tggtctatgcatggcatgta

SEQ ID NO: 16107 - RNA, 20 nt, synthetic construct
  source 1..20: mol_type = other RNA
tggtgatatatacattatcc

SEQ ID NO: 16108 - RNA, 20 nt, synthetic construct
  source 1..20: mol_type = other RNA
tggtggtgatatatacatta

SEQ ID NO: 16109 - RNA, 20 nt, synthetic construct
  source 1..20: mol_type = other RNA
tggttatgttagatgtcatt

SEQ ID NO: 16110 - RNA, 20 nt, synthetic construct
  source 1..20: mol_type = other RNA
tgtaatgatgattgcctctg

SEQ ID NO: 16111 - RNA, 20 nt, synthetic construct
  source 1..20: mol_type = other RNA
tgtatatatcaccaccatta

SEQ ID NO: 16112 - RNA, 20 nt, synthetic construct
  source 1..20: mol_type = other RNA
tgtggtatcttccagaaatg

SEQ ID NO: 16113 - RNA, 20 nt, synthetic construct
  source 1..20: mol_type = other RNA
tgtttcttgtggtatcttcc

SEQ ID NO: 16114 - RNA, 20 nt, synthetic construct
  source 1..20: mol_type = other RNA
tgttttgatcatgagaaaat

SEQ ID NO: 16115 - RNA, 20 nt, synthetic construct
  source 1..20: mol_type = other RNA
ttaaatgcaattttctcatg

SEQ ID NO: 16116 - RNA, 20 nt, synthetic construct
  source 1..20: mol_type = other RNA
ttacaacataaaggataatg

SEQ ID NO: 16117 - RNA, 20 nt, synthetic construct
  source 1..20: mol_type = other RNA
ttacatgtttcttgtggtat

SEQ ID NO: 16118 - RNA, 20 nt, synthetic construct
  source 1..20: mol_type = other RNA
ttactggtatttgctggtta

SEQ ID NO: 16119 - RNA, 20 nt, synthetic construct
  source 1..20: mol_type = other RNA
ttcagaggcaatcatcatta

SEQ ID NO: 16120 - RNA, 20 nt, synthetic construct
  source 1..20: mol_type = other RNA
ttccaaagtaatacatgcca

SEQ ID NO: 16121 - RNA, 20 nt, synthetic construct
  source 1..20: mol_type = other RNA
ttccagaaatggtctatgca

SEQ ID NO: 16122 - RNA, 20 nt, synthetic construct
  source 1..20: mol_type = other RNA
ttctcatgatcaaaacattc

SEQ ID NO: 16123 - RNA, 20 nt, synthetic construct
  source 1..20: mol_type = other RNA
ttctggaagataccacaaga

SEQ ID NO: 16124 - RNA, 20 nt, synthetic construct
  source 1..20: mol_type = other RNA
ttcttgtggtatcttccaga

SEQ ID NO: 16125 - RNA, 20 nt, synthetic construct
  source 1..20: mol_type = other RNA
ttgatcatgagaaaattgca

SEQ ID NO: 16126 - RNA, 20 nt, synthetic construct
  source 1..20: mol_type = other RNA
ttgctggttatgttagatgt

SEQ ID NO: 16127 - RNA, 20 nt, synthetic construct
  source 1..20: mol_type = other RNA
ttgtggtatcttccagaaat

SEQ ID NO: 16128 - RNA, 20 nt, synthetic construct
  source 1..20: mol_type = other RNA
tttccaaagtaatacatgcc

SEQ ID NO: 16129 - RNA, 20 nt, synthetic construct
  source 1..20: mol_type = other RNA
tttctcatgatcaaaacatt

SEQ ID NO: 16130 - RNA, 20 nt, synthetic construct
  source 1..20: mol_type = other RNA
tttctggaagataccacaag

SEQ ID NO: 16131 - RNA, 20 nt, synthetic construct
  source 1..20: mol_type = other RNA
tttcttgtggtatcttccag

SEQ ID NO: 16132 - RNA, 20 nt, synthetic construct
  source 1..20: mol_type = other RNA
tttgatcatgagaaaattgc

SEQ ID NO: 16133 - RNA, 20 nt, synthetic construct
  source 1..20: mol_type = other RNA
tttgctggttatgttagatg

SEQ ID NO: 16134 - RNA, 20 nt, synthetic construct
  source 1..20: mol_type = other RNA
ttttctcatgatcaaaacat

SEQ ID NO: 16135 - RNA, 20 nt, synthetic construct
  source 1..20: mol_type = other RNA
ttttgatcatgagaaaattg

SEQ ID NO: 16136 - RNA, 21 nt, synthetic construct
  source 1..21: mol_type = other RNA
aaaacatgatcgaaagcagaa

SEQ ID NO: 16137 - RNA, 21 nt, synthetic construct
  source 1..21: mol_type = other RNA
aaaacattctgctttcgatca

SEQ ID NO: 16138 - RNA, 21 nt, synthetic construct
  source 1..21: mol_type = other RNA
aaaatagaccttcagaggcaa

SEQ ID NO: 16139 - RNA, 21 nt, synthetic construct
  source 1..21: mol_type = other RNA
aaaatgacatctaacataacc

SEQ ID NO: 16140 - RNA, 21 nt, synthetic construct
  source 1..21: mol_type = other RNA
aaacatgatcgaaagcagaat

SEQ ID NO: 16141 - RNA, 21 nt, synthetic construct
  source 1..21: mol_type = other RNA
aaacatgtaatgatgattgcc

SEQ ID NO: 16142 - RNA, 21 nt, synthetic construct
  source 1..21: mol_type = other RNA
aaacattctgctttcgatcat

SEQ ID NO: 16143 - RNA, 21 nt, synthetic construct
  source 1..21: mol_type = other RNA
aaagcagaatgttttgatcat

SEQ ID NO: 16144 - RNA, 21 nt, synthetic construct
  source 1..21: mol_type = other RNA
aaagtaatacatgccatgcat

SEQ ID NO: 16145 - RNA, 21 nt, synthetic construct
  source 1..21: mol_type = other RNA
aaataccagtaatggtggtga

SEQ ID NO: 16146 - RNA, 21 nt, synthetic construct
  source 1..21: mol_type = other RNA
aaatagaccttcagaggcaat

SEQ ID NO: 16147 - RNA, 21 nt, synthetic construct
  source 1..21: mol_type = other RNA
aaatgacatctaacataacca

SEQ ID NO: 16148 - RNA, 21 nt, synthetic construct
  source 1..21: mol_type = other RNA
aaatgcaattttctcatgatc

SEQ ID NO: 16149 - RNA, 21 nt, synthetic construct
  source 1..21: mol_type = other RNA
aaatggtctatgcatggcatg

SEQ ID NO: 16150 - RNA, 21 nt, synthetic construct
  source 1..21: mol_type = other RNA
aacataaccagcaaataccag

SEQ ID NO: 16151 - RNA, 21 nt, synthetic construct
  source 1..21: mol_type = other RNA
aacatgatcgaaagcagaatg

SEQ ID NO: 16152 - RNA, 21 nt, synthetic construct
  source 1..21: mol_type = other RNA
aacatgtaatgatgattgcct

SEQ ID NO: 16153 - RNA, 21 nt, synthetic construct
  source 1..21: mol_type = other RNA
aaccagcaaataccagtaatg

SEQ ID NO: 16154 - RNA, 21 nt, synthetic construct
  source 1..21: mol_type = other RNA
aagataccacaagaaacatgt

SEQ ID NO: 16155 - RNA, 21 nt, synthetic construct
  source 1..21: mol_type = other RNA
aagcagaatgttttgatcatg

SEQ ID NO: 16156 - RNA, 21 nt, synthetic construct
  source 1..21: mol_type = other RNA
aaggataatgtatatatcacc

SEQ ID NO: 16157 - RNA, 21 nt, synthetic construct
  source 1..21: mol_type = other RNA
aagtaatacatgccatgcata

SEQ ID NO: 16158 - RNA, 21 nt, synthetic construct
  source 1..21: mol_type = other RNA
aatacatgccatgcatagacc

SEQ ID NO: 16159 - RNA, 21 nt, synthetic construct
  source 1..21: mol_type = other RNA
aataccagtaatggtggtgat

SEQ ID NO: 16160 - RNA, 21 nt, synthetic construct
  source 1..21: mol_type = other RNA
aatagaccttcagaggcaatc

SEQ ID NO: 16161 - RNA, 21 nt, synthetic construct
  source 1..21: mol_type = other RNA
aatgacatctaacataaccag

SEQ ID NO: 16162 - RNA, 21 nt, synthetic construct
  source 1..21: mol_type = other RNA
aatgatgattgcctctgaagg

SEQ ID NO: 16163 - RNA, 21 nt, synthetic construct
  source 1..21: mol_type = other RNA
aatgcaattttctcatgatca

SEQ ID NO: 16164 - RNA, 21 nt, synthetic construct
  source 1..21: mol_type = other RNA
aatggtctatgcatggcatgt

SEQ ID NO: 16165 - RNA, 21 nt, synthetic construct
  source 1..21: mol_type = other RNA
aatggtggtgatatatacatt

SEQ ID NO: 16166 - RNA, 21 nt, synthetic construct
  source 1..21: mol_type = other RNA
aatgtatatatcaccaccatt

SEQ ID NO: 16167 - RNA, 21 nt, synthetic construct
  source 1..21: mol_type = other RNA
aatttccaaagtaatacatgc

SEQ ID NO: 16168 - RNA, 21 nt, synthetic construct
  source 1..21: mol_type = other RNA
acaagaaacatgtaatgatga

SEQ ID NO: 16169 - RNA, 21 nt, synthetic construct
  source 1..21: mol_type = other RNA
acataaccagcaaataccagt

SEQ ID NO: 16170 - RNA, 21 nt, synthetic construct
  source 1..21: mol_type = other RNA
acatctaacataaccagcaaa

SEQ ID NO: 16171 - RNA, 21 nt, synthetic construct
  source 1..21: mol_type = other RNA
acatgatcgaaagcagaatgt

SEQ ID NO: 16172 - RNA, 21 nt, synthetic construct
  source 1..21: mol_type = other RNA
acatgccatgcatagaccatt

SEQ ID NO: 16173 - RNA, 21 nt, synthetic construct
  source 1..21: mol_type = other RNA
acatgtaatgatgattgcctc

SEQ ID NO: 16174 - RNA, 21 nt, synthetic construct
  source 1..21: mol_type = other RNA
acatgtttcttgtggtatctt

SEQ ID NO: 16175 - RNA, 21 nt, synthetic construct
  source 1..21: mol_type = other RNA
accacaagaaacatgtaatga

SEQ ID NO: 16176 - RNA, 21 nt, synthetic construct
  source 1..21: mol_type = other RNA
accaccattactggtatttgc

SEQ ID NO: 16177 - RNA, 21 nt, synthetic construct
  source 1..21: mol_type = other RNA
accagcaaataccagtaatgg

SEQ ID NO: 16178 - RNA, 21 nt, synthetic construct
  source 1..21: mol_type = other RNA
accagtaatggtggtgatata

SEQ ID NO: 16179 - RNA, 21 nt, synthetic construct
  source 1..21: mol_type = other RNA
accattactggtatttgctgg

SEQ ID NO: 16180 - RNA, 21 nt, synthetic construct
  source 1..21: mol_type = other RNA
accatttctggaagataccac

SEQ ID NO: 16181 - RNA, 21 nt, synthetic construct
  source 1..21: mol_type = other RNA
accttcagaggcaatcatcat

SEQ ID NO: 16182 - RNA, 21 nt, synthetic construct
  source 1..21: mol_type = other RNA
actggtatttgctggttatgt

SEQ ID NO: 16183 - RNA, 21 nt, synthetic construct
  source 1..21: mol_type = other RNA
agaaacatgtaatgatgattg

SEQ ID NO: 16184 - RNA, 21 nt, synthetic construct
  source 1..21: mol_type = other RNA
agaaatggtctatgcatggca

SEQ ID NO: 16185 - RNA, 21 nt, synthetic construct
  source 1..21: mol_type = other RNA
agaatgttttgatcatgagaa

SEQ ID NO: 16186 - RNA, 21 nt, synthetic construct
  source 1..21: mol_type = other RNA
agaccatttctggaagatacc

SEQ ID NO: 16187 - RNA, 21 nt, synthetic construct
  source 1..21: mol_type = other RNA
agaccttcagaggcaatcatc

SEQ ID NO: 16188 - RNA, 21 nt, synthetic construct
  source 1..21: mol_type = other RNA
agaggcaatcatcattacatg

SEQ ID NO: 16189 - RNA, 21 nt, synthetic construct
  source 1..21: mol_type = other RNA
agataccacaagaaacatgta

SEQ ID NO: 16190 - RNA, 21 nt, synthetic construct
  source 1..21: mol_type = other RNA
agcaaataccagtaatggtgg

SEQ ID NO: 16191 - RNA, 21 nt, synthetic construct
  source 1..21: mol_type = other RNA
agcagaatgttttgatcatga

SEQ ID NO: 16192 - RNA, 21 nt, synthetic construct
  source 1..21: mol_type = other RNA
aggaaaatagaccttcagagg

SEQ ID NO: 16193 - RNA, 21 nt, synthetic construct
  source 1..21: mol_type = other RNA
aggataatgtatatatcacca

SEQ ID NO: 16194 - RNA, 21 nt, synthetic construct
  source 1..21: mol_type = other RNA
aggcaatcatcattacatgtt

SEQ ID NO: 16195 - RNA, 21 nt, synthetic construct
  source 1..21: mol_type = other RNA
agtaatacatgccatgcatag

SEQ ID NO: 16196 - RNA, 21 nt, synthetic construct
  source 1..21: mol_type = other RNA
agtaatggtggtgatatatac

SEQ ID NO: 16197 - RNA, 21 nt, synthetic construct
  source 1..21: mol_type = other RNA
ataaccagcaaataccagtaa

SEQ ID NO: 16198 - RNA, 21 nt, synthetic construct
  source 1..21: mol_type = other RNA
ataatgtatatatcaccacca

SEQ ID NO: 16199 - RNA, 21 nt, synthetic construct
  source 1..21: mol_type = other RNA
atacatgccatgcatagacca

SEQ ID NO: 16200 - RNA, 21 nt, synthetic construct
  source 1..21: mol_type = other RNA
ataccacaagaaacatgtaat

SEQ ID NO: 16201 - RNA, 21 nt, synthetic construct
  source 1..21: mol_type = other RNA
ataccagtaatggtggtgata

SEQ ID NO: 16202 - RNA, 21 nt, synthetic construct
  source 1..21: mol_type = other RNA
atagaccatttctggaagata

SEQ ID NO: 16203 - RNA, 21 nt, synthetic construct
  source 1..21: mol_type = other RNA
atagaccttcagaggcaatca

SEQ ID NO: 16204 - RNA, 21 nt, synthetic construct
  source 1..21: mol_type = other RNA
atatatcaccaccattactgg

SEQ ID NO: 16205 - RNA, 21 nt, synthetic construct
  source 1..21: mol_type = other RNA
atatcaccaccattactggta

SEQ ID NO: 16206 - RNA, 21 nt, synthetic construct
  source 1..21: mol_type = other RNA
atcaaaacattctgctttcga

SEQ ID NO: 16207 - RNA, 21 nt, synthetic construct
  source 1..21: mol_type = other RNA
atcaccaccattactggtatt

SEQ ID NO: 16208 - RNA, 21 nt, synthetic construct
  source 1..21: mol_type = other RNA
atcatcattacatgtttcttg

SEQ ID NO: 16209 - RNA, 21 nt, synthetic construct
  source 1..21: mol_type = other RNA
atcattacatgtttcttgtgg

SEQ ID NO: 16210 - RNA, 21 nt, synthetic construct
  source 1..21: mol_type = other RNA
atcgaaagcagaatgttttga

SEQ ID NO: 16211 - RNA, 21 nt, synthetic construct
  source 1..21: mol_type = other RNA
atctaacataaccagcaaata

SEQ ID NO: 16212 - RNA, 21 nt, synthetic construct
  source 1..21: mol_type = other RNA
atcttccagaaatggtctatg

SEQ ID NO: 16213 - RNA, 21 nt, synthetic construct
  source 1..21: mol_type = other RNA
atgacatctaacataaccagc

SEQ ID NO: 16214 - RNA, 21 nt, synthetic construct
  source 1..21: mol_type = other RNA
atgatcaaaacattctgcttt

SEQ ID NO: 16215 - RNA, 21 nt, synthetic construct
  source 1..21: mol_type = other RNA
atgatcgaaagcagaatgttt

SEQ ID NO: 16216 - RNA, 21 nt, synthetic construct
  source 1..21: mol_type = other RNA
atgatgattgcctctgaaggt

SEQ ID NO: 16217 - RNA, 21 nt, synthetic construct
  source 1..21: mol_type = other RNA
atgattgcctctgaaggtcta

SEQ ID NO: 16218 - RNA, 21 nt, synthetic construct
  source 1..21: mol_type = other RNA
atgcaattttctcatgatcaa

SEQ ID NO: 16219 - RNA, 21 nt, synthetic construct
  source 1..21: mol_type = other RNA
atgcatagaccatttctggaa

SEQ ID NO: 16220 - RNA, 21 nt, synthetic construct
  source 1..21: mol_type = other RNA
atgcatggcatgtattacttt

SEQ ID NO: 16221 - RNA, 21 nt, synthetic construct
  source 1..21: mol_type = other RNA
atgccatgcatagaccatttc

SEQ ID NO: 16222 - RNA, 21 nt, synthetic construct
  source 1..21: mol_type = other RNA
atggcatgtattactttggaa

SEQ ID NO: 16223 - RNA, 21 nt, synthetic construct
  source 1..21: mol_type = other RNA
atggtctatgcatggcatgta

SEQ ID NO: 16224 - RNA, 21 nt, synthetic construct
  source 1..21: mol_type = other RNA
atggtggtgatatatacatta

SEQ ID NO: 16225 - RNA, 21 nt, synthetic construct
  source 1..21: mol_type = other RNA
atgtaatgatgattgcctctg

SEQ ID NO: 16226 - RNA, 21 nt, synthetic construct
  source 1..21: mol_type = other RNA
atgtatatatcaccaccatta

SEQ ID NO: 16227 - RNA, 21 nt, synthetic construct
  source 1..21: mol_type = other RNA
atgtttcttgtggtatcttcc

SEQ ID NO: 16228 - RNA, 21 nt, synthetic construct
  source 1..21: mol_type = other RNA
attacatgtttcttgtggtat

SEQ ID NO: 16229 - RNA, 21 nt, synthetic construct
  source 1..21: mol_type = other RNA
attactggtatttgctggtta

SEQ ID NO: 16230 - RNA, 21 nt, synthetic construct
  source 1..21: mol_type = other RNA
atttccaaagtaatacatgcc

SEQ ID NO: 16231 - RNA, 21 nt, synthetic construct
  source 1..21: mol_type = other RNA
atttctggaagataccacaag

SEQ ID NO: 16232 - RNA, 21 nt, synthetic construct
  source 1..21: mol_type = other RNA
atttgctggttatgttagatg

SEQ ID NO: 16233 - RNA, 21 nt, synthetic construct
  source 1..21: mol_type = other RNA
caaaacatgatcgaaagcaga

SEQ ID NO: 16234 - RNA, 21 nt, synthetic construct
  source 1..21: mol_type = other RNA
caaaacattctgctttcgatc

SEQ ID NO: 16235 - RNA, 21 nt, synthetic construct
  source 1..21: mol_type = other RNA
caaagtaatacatgccatgca

SEQ ID NO: 16236 - RNA, 21 nt, synthetic construct
  source 1..21: mol_type = other RNA
caaataccagtaatggtggtg

SEQ ID NO: 16237 - RNA, 21 nt, synthetic construct
  source 1..21: mol_type = other RNA
caagaaacatgtaatgatgat

SEQ ID NO: 16238 - RNA, 21 nt, synthetic construct
  source 1..21: mol_type = other RNA
caatcatcattacatgtttct

SEQ ID NO: 16239 - RNA, 21 nt, synthetic construct
  source 1..21: mol_type = other RNA
caattttctcatgatcaaaac

SEQ ID NO: 16240 - RNA, 21 nt, synthetic construct
  source 1..21: mol_type = other RNA
cacaagaaacatgtaatgatg

SEQ ID NO: 16241 - RNA, 21 nt, synthetic construct
  source 1..21: mol_type = other RNA
caccaccattactggtatttg

SEQ ID NO: 16242 - RNA, 21 nt, synthetic construct
  source 1..21: mol_type = other RNA
caccattactggtatttgctg

SEQ ID NO: 16243 - RNA, 21 nt, synthetic construct
  source 1..21: mol_type = other RNA
cagaaatggtctatgcatggc

SEQ ID NO: 16244 - RNA, 21 nt, synthetic construct
  source 1..21: mol_type = other RNA
cagaatgttttgatcatgaga

SEQ ID NO: 16245 - RNA, 21 nt, synthetic construct
  source 1..21: mol_type = other RNA
cagaggcaatcatcattacat

SEQ ID NO: 16246 - RNA, 21 nt, synthetic construct
  source 1..21: mol_type = other RNA
cagcaaataccagtaatggtg

SEQ ID NO: 16247 - RNA, 21 nt, synthetic construct
  source 1..21: mol_type = other RNA
cagtaatggtggtgatatata

SEQ ID NO: 16248 - RNA, 21 nt, synthetic construct
  source 1..21: mol_type = other RNA
cataaccagcaaataccagta

SEQ ID NO: 16249 - RNA, 21 nt, synthetic construct
  source 1..21: mol_type = other RNA
catagaccatttctggaagat

SEQ ID NO: 16250 - RNA, 21 nt, synthetic construct
  source 1..21: mol_type = other RNA
catcattacatgtttcttgtg

SEQ ID NO: 16251 - RNA, 21 nt, synthetic construct
  source 1..21: mol_type = other RNA
catctaacataaccagcaaat

SEQ ID NO: 16252 - RNA, 21 nt, synthetic construct
  source 1..21: mol_type = other RNA
catgatcaaaacattctgctt

SEQ ID NO: 16253 - RNA, 21 nt, synthetic construct
  source 1..21: mol_type = other RNA
catgatcgaaagcagaatgtt

SEQ ID NO: 16254 - RNA, 21 nt, synthetic construct
  source 1..21: mol_type = other RNA
catgcatagaccatttctgga

SEQ ID NO: 16255 - RNA, 21 nt, synthetic construct
  source 1..21: mol_type = other RNA
catgccatgcatagaccattt

SEQ ID NO: 16256 - RNA, 21 nt, synthetic construct
  source 1..21: mol_type = other RNA
catggcatgtattactttgga

SEQ ID NO: 16257 - RNA, 21 nt, synthetic construct
  source 1..21: mol_type = other RNA
catgtaatgatgattgcctct

SEQ ID NO: 16258 - RNA, 21 nt, synthetic construct
  source 1..21: mol_type = other RNA
catgtttcttgtggtatcttc

SEQ ID NO: 16259 - RNA, 21 nt, synthetic construct
  source 1..21: mol_type = other RNA
cattacatgtttcttgtggta

SEQ ID NO: 16260 - RNA, 21 nt, synthetic construct
  source 1..21: mol_type = other RNA
cattactggtatttgctggtt

SEQ ID NO: 16261 - RNA, 21 nt, synthetic construct
  source 1..21: mol_type = other RNA
catttctggaagataccacaa

SEQ ID NO: 16262 - RNA, 21 nt, synthetic construct
  source 1..21: mol_type = other RNA
ccaaagtaatacatgccatgc

SEQ ID NO: 16263 - RNA, 21 nt, synthetic construct
  source 1..21: mol_type = other RNA
ccacaagaaacatgtaatgat

SEQ ID NO: 16264 - RNA, 21 nt, synthetic construct
  source 1..21: mol_type = other RNA
ccaccattactggtatttgct

SEQ ID NO: 16265 - RNA, 21 nt, synthetic construct
  source 1..21: mol_type = other RNA
ccagaaatggtctatgcatgg

SEQ ID NO: 16266 - RNA, 21 nt, synthetic construct
  source 1..21: mol_type = other RNA
ccagcaaataccagtaatggt

SEQ ID NO: 16267 - RNA, 21 nt, synthetic construct
  source 1..21: mol_type = other RNA
ccagtaatggtggtgatatat

SEQ ID NO: 16268 - RNA, 21 nt, synthetic construct
  source 1..21: mol_type = other RNA
ccatgcatagaccatttctgg

SEQ ID NO: 16269 - RNA, 21 nt, synthetic construct
  source 1..21: mol_type = other RNA
ccattactggtatttgctggt

SEQ ID NO: 16270 - RNA, 21 nt, synthetic construct
  source 1..21: mol_type = other RNA
ccatttctggaagataccaca

SEQ ID NO: 16271 - RNA, 21 nt, synthetic construct
  source 1..21: mol_type = other RNA
ccttcagaggcaatcatcatt

SEQ ID NO: 16272 - RNA, 21 nt, synthetic construct
  source 1..21: mol_type = other RNA
cgaaagcagaatgttttgatc

SEQ ID NO: 16273 - RNA, 21 nt, synthetic construct
  source 1..21: mol_type = other RNA
ctaacataaccagcaaatacc

SEQ ID NO: 16274 - RNA, 21 nt, synthetic construct
  source 1..21: mol_type = other RNA
ctatgcatggcatgtattact

SEQ ID NO: 16275 - RNA, 21 nt, synthetic construct
  source 1..21: mol_type = other RNA
ctcatgatcaaaacattctgc

SEQ ID NO: 16276 - RNA, 21 nt, synthetic construct
  source 1..21: mol_type = other RNA
ctggaagataccacaagaaac

SEQ ID NO: 16277 - RNA, 21 nt, synthetic construct
  source 1..21: mol_type = other RNA
ctggtatttgctggttatgtt

SEQ ID NO: 16278 - RNA, 21 nt, synthetic construct
  source 1..21: mol_type = other RNA
ctggttatgttagatgtcatt

SEQ ID NO: 16279 - RNA, 21 nt, synthetic construct
  source 1..21: mol_type = other RNA
cttcagaggcaatcatcatta

SEQ ID NO: 16280 - RNA, 21 nt, synthetic construct
  source 1..21: mol_type = other RNA
cttccagaaatggtctatgca

SEQ ID NO: 16281 - RNA, 21 nt, synthetic construct
  source 1..21: mol_type = other RNA
cttgtggtatcttccagaaat

SEQ ID NO: 16282 - RNA, 21 nt, synthetic construct
  source 1..21: mol_type = other RNA
gaaaatagaccttcagaggca

SEQ ID NO: 16283 - RNA, 21 nt, synthetic construct
  source 1..21: mol_type = other RNA
gaaacatgtaatgatgattgc

SEQ ID NO: 16284 - RNA, 21 nt, synthetic construct
  source 1..21: mol_type = other RNA
gaaagcagaatgttttgatca

SEQ ID NO: 16285 - RNA, 21 nt, synthetic construct
  source 1..21: mol_type = other RNA
gaaatggtctatgcatggcat

SEQ ID NO: 16286 - RNA, 21 nt, synthetic construct
  source 1..21: mol_type = other RNA
gaagataccacaagaaacatg

SEQ ID NO: 16287 - RNA, 21 nt, synthetic construct
  source 1..21: mol_type = other RNA
gaatgttttgatcatgagaaa

SEQ ID NO: 16288 - RNA, 21 nt, synthetic construct
  source 1..21: mol_type = other RNA
gacatctaacataaccagcaa

SEQ ID NO: 16289 - RNA, 21 nt, synthetic construct
  source 1..21: mol_type = other RNA
gaccatttctggaagatacca

SEQ ID NO: 16290 - RNA, 21 nt, synthetic construct
  source 1..21: mol_type = other RNA
gaccttcagaggcaatcatca

SEQ ID NO: 16291 - RNA, 21 nt, synthetic construct
  source 1..21: mol_type = other RNA
gaggaaaatagaccttcagag

SEQ ID NO: 16292 - RNA, 21 nt, synthetic construct
  source 1..21: mol_type = other RNA
gaggcaatcatcattacatgt

SEQ ID NO: 16293 - RNA, 21 nt, synthetic construct
  source 1..21: mol_type = other RNA
gataatgtatatatcaccacc

SEQ ID NO: 16294 - RNA, 21 nt, synthetic construct
  source 1..21: mol_type = other RNA
gataccacaagaaacatgtaa

SEQ ID NO: 16295 - RNA, 21 nt, synthetic construct
  source 1..21: mol_type = other RNA
gatcaaaacattctgctttcg

SEQ ID NO: 16296 - RNA, 21 nt, synthetic construct
  source 1..21: mol_type = other RNA
gatcatgagaaaattgcattt

SEQ ID NO: 16297 - RNA, 21 nt, synthetic construct
  source 1..21: mol_type = other RNA
gatcgaaagcagaatgttttg

SEQ ID NO: 16298 - RNA, 21 nt, synthetic construct
  source 1..21: mol_type = other RNA
gatgattgcctctgaaggtct

SEQ ID NO: 16299 - RNA, 21 nt, synthetic construct
  source 1..21: mol_type = other RNA
gcaaaacatgatcgaaagcag

SEQ ID NO: 16300 - RNA, 21 nt, synthetic construct
  source 1..21: mol_type = other RNA
gcaaataccagtaatggtggt

SEQ ID NO: 16301 - RNA, 21 nt, synthetic construct
  source 1..21: mol_type = other RNA
gcaatcatcattacatgtttc

SEQ ID NO: 16302 - RNA, 21 nt, synthetic construct
  source 1..21: mol_type = other RNA
gcaattttctcatgatcaaaa

SEQ ID NO: 16303 - RNA, 21 nt, synthetic construct
  source 1..21: mol_type = other RNA
gcagaatgttttgatcatgag

SEQ ID NO: 16304 - RNA, 21 nt, synthetic construct
  source 1..21: mol_type = other RNA
gcatagaccatttctggaaga

SEQ ID NO: 16305 - RNA, 21 nt, synthetic construct
  source 1..21: mol_type = other RNA
gcatggcatgtattactttgg

SEQ ID NO: 16306 - RNA, 21 nt, synthetic construct
  source 1..21: mol_type = other RNA
gcatgtattactttggaaatt

SEQ ID NO: 16307 - RNA, 21 nt, synthetic construct
  source 1..21: mol_type = other RNA
gccatgcatagaccatttctg

SEQ ID NO: 16308 - RNA, 21 nt, synthetic construct
  source 1..21: mol_type = other RNA
gctggttatgttagatgtcat

SEQ ID NO: 16309 - RNA, 21 nt, synthetic construct
  source 1..21: mol_type = other RNA
ggaaaatagaccttcagaggc

SEQ ID NO: 16310 - RNA, 21 nt, synthetic construct
  source 1..21: mol_type = other RNA
ggaagataccacaagaaacat

SEQ ID NO: 16311 - RNA, 21 nt, synthetic construct
  source 1..21: mol_type = other RNA
ggataatgtatatatcaccac

SEQ ID NO: 16312 - RNA, 21 nt, synthetic construct
  source 1..21: mol_type = other RNA
ggcaaaacatgatcgaaagca

SEQ ID NO: 16313 - RNA, 21 nt, synthetic construct
  source 1..21: mol_type = other RNA
ggcaatcatcattacatgttt

SEQ ID NO: 16314 - RNA, 21 nt, synthetic construct
  source 1..21: mol_type = other RNA
ggcatgtattactttggaaat

SEQ ID NO: 16315 - RNA, 21 nt, synthetic construct
  source 1..21: mol_type = other RNA
ggtatcttccagaaatggtct

SEQ ID NO: 16316 - RNA, 21 nt, synthetic construct
  source 1..21: mol_type = other RNA
ggtatttgctggttatgttag

SEQ ID NO: 16317 - RNA, 21 nt, synthetic construct
  source 1..21: mol_type = other RNA
ggtctatgcatggcatgtatt

SEQ ID NO: 16318 - RNA, 21 nt, synthetic construct
  source 1..21: mol_type = other RNA
ggtgatatatacattatcctt

SEQ ID NO: 16319 - RNA, 21 nt, synthetic construct
  source 1..21: mol_type = other RNA
ggtggtgatatatacattatc

SEQ ID NO: 16320 - RNA, 21 nt, synthetic construct
  source 1..21: mol_type = other RNA
ggttatgttagatgtcatttt

SEQ ID NO: 16321 - RNA, 21 nt, synthetic construct
  source 1..21: mol_type = other RNA
gtaatacatgccatgcataga

SEQ ID NO: 16322 - RNA, 21 nt, synthetic construct
  source 1..21: mol_type = other RNA
gtaatgatgattgcctctgaa

SEQ ID NO: 16323 - RNA, 21 nt, synthetic construct
  source 1..21: mol_type = other RNA
gtaatggtggtgatatataca

SEQ ID NO: 16324 - RNA, 21 nt, synthetic construct
  source 1..21: mol_type = other RNA
gtatatatcaccaccattact

SEQ ID NO: 16325 - RNA, 21 nt, synthetic construct
  source 1..21: mol_type = other RNA
gtatcttccagaaatggtcta

SEQ ID NO: 16326 - RNA, 21 nt, synthetic construct
  source 1..21: mol_type = other RNA
gtatttgctggttatgttaga

SEQ ID NO: 16327 - RNA, 21 nt, synthetic construct
  source 1..21: mol_type = other RNA
gtctatgcatggcatgtatta

SEQ ID NO: 16328 - RNA, 21 nt, synthetic construct
  source 1..21: mol_type = other RNA
gtggtatcttccagaaatggt

SEQ ID NO: 16329 - RNA, 21 nt, synthetic construct
  source 1..21: mol_type = other RNA
gtggtgatatatacattatcc

SEQ ID NO: 16330 - RNA, 21 nt, synthetic construct
  source 1..21: mol_type = other RNA
gtttcttgtggtatcttccag

SEQ ID NO: 16331 - RNA, 21 nt, synthetic construct
  source 1..21: mol_type = other RNA
gttttgatcatgagaaaattg

SEQ ID NO: 16332 - RNA, 21 nt, synthetic construct
  source 1..21: mol_type = other RNA
taacataaccagcaaatacca

SEQ ID NO: 16333 - RNA, 21 nt, synthetic construct
  source 1..21: mol_type = other RNA
taaccagcaaataccagtaat

SEQ ID NO: 16334 - RNA, 21 nt, synthetic construct
  source 1..21: mol_type = other RNA
taatacatgccatgcatagac

SEQ ID NO: 16335 - RNA, 21 nt, synthetic construct
  source 1..21: mol_type = other RNA
taatgatgattgcctctgaag

SEQ ID NO: 16336 - RNA, 21 nt, synthetic construct
  source 1..21: mol_type = other RNA
taatggtggtgatatatacat

SEQ ID NO: 16337 - RNA, 21 nt, synthetic construct
  source 1..21: mol_type = other RNA
taatgtatatatcaccaccat

SEQ ID NO: 16338 - RNA, 21 nt, synthetic construct
  source 1..21: mol_type = other RNA
tacatgccatgcatagaccat

SEQ ID NO: 16339 - RNA, 21 nt, synthetic construct
  source 1..21: mol_type = other RNA
tacatgtttcttgtggtatct

SEQ ID NO: 16340 - RNA, 21 nt, synthetic construct
  source 1..21: mol_type = other RNA
taccacaagaaacatgtaatg

SEQ ID NO: 16341 - RNA, 21 nt, synthetic construct
  source 1..21: mol_type = other RNA
taccagtaatggtggtgatat

SEQ ID NO: 16342 - RNA, 21 nt, synthetic construct
  source 1..21: mol_type = other RNA
tactggtatttgctggttatg

SEQ ID NO: 16343 - RNA, 21 nt, synthetic construct
  source 1..21: mol_type = other RNA
tagaccatttctggaagatac

SEQ ID NO: 16344 - RNA, 21 nt, synthetic construct
  source 1..21: mol_type = other RNA
tagaccttcagaggcaatcat

SEQ ID NO: 16345 - RNA, 21 nt, synthetic construct
  source 1..21: mol_type = other RNA
tatatatcaccaccattactg

SEQ ID NO: 16346 - RNA, 21 nt, synthetic construct
  source 1..21: mol_type = other RNA
tatatcaccaccattactggt

SEQ ID NO: 16347 - RNA, 21 nt, synthetic construct
  source 1..21: mol_type = other RNA
tatcaccaccattactggtat

SEQ ID NO: 16348 - RNA, 21 nt, synthetic construct
  source 1..21: mol_type = other RNA
tatcttccagaaatggtctat

SEQ ID NO: 16349 - RNA, 21 nt, synthetic construct
  source 1..21: mol_type = other RNA
tatgcatggcatgtattactt

SEQ ID NO: 16350 - RNA, 21 nt, synthetic construct
  source 1..21: mol_type = other RNA
tatttgctggttatgttagat

SEQ ID NO: 16351 - RNA, 21 nt, synthetic construct
  source 1..21: mol_type = other RNA
tcaaaacattctgctttcgat

SEQ ID NO: 16352 - RNA, 21 nt, synthetic construct
  source 1..21: mol_type = other RNA
tcaccaccattactggtattt

SEQ ID NO: 16353 - RNA, 21 nt, synthetic construct
  source 1..21: mol_type = other RNA
tcagaggcaatcatcattaca

SEQ ID NO: 16354 - RNA, 21 nt, synthetic construct
  source 1..21: mol_type = other RNA
tcatcattacatgtttcttgt

SEQ ID NO: 16355 - RNA, 21 nt, synthetic construct
  source 1..21: mol_type = other RNA
tcatgatcaaaacattctgct

SEQ ID NO: 16356 - RNA, 21 nt, synthetic construct
  source 1..21: mol_type = other RNA
tcattacatgtttcttgtggt

SEQ ID NO: 16357 - RNA, 21 nt, synthetic construct
  source 1..21: mol_type = other RNA
tccaaagtaatacatgccatg

SEQ ID NO: 16358 - RNA, 21 nt, synthetic construct
  source 1..21: mol_type = other RNA
tccagaaatggtctatgcatg

SEQ ID NO: 16359 - RNA, 21 nt, synthetic construct
  source 1..21: mol_type = other RNA
tcgaaagcagaatgttttgat

SEQ ID NO: 16360 - RNA, 21 nt, synthetic construct
  source 1..21: mol_type = other RNA
tctaacataaccagcaaatac

SEQ ID NO: 16361 - RNA, 21 nt, synthetic construct
  source 1..21: mol_type = other RNA
tctatgcatggcatgtattac

SEQ ID NO: 16362 - RNA, 21 nt, synthetic construct
  source 1..21: mol_type = other RNA
tctcatgatcaaaacattctg

SEQ ID NO: 16363 - RNA, 21 nt, synthetic construct
  source 1..21: mol_type = other RNA
tctggaagataccacaagaaa

SEQ ID NO: 16364 - RNA, 21 nt, synthetic construct
  source 1..21: mol_type = other RNA
tcttccagaaatggtctatgc

SEQ ID NO: 16365 - RNA, 21 nt, synthetic construct
  source 1..21: mol_type = other RNA
tcttgtggtatcttccagaaa

SEQ ID NO: 16366 - RNA, 21 nt, synthetic construct
  source 1..21: mol_type = other RNA
tgacatctaacataaccagca

SEQ ID NO: 16367 - RNA, 21 nt, synthetic construct
  source 1..21: mol_type = other RNA
tgatcaaaacattctgctttc

SEQ ID NO: 16368 - RNA, 21 nt, synthetic construct
  source 1..21: mol_type = other RNA
tgatcatgagaaaattgcatt

SEQ ID NO: 16369 - RNA, 21 nt, synthetic construct
  source 1..21: mol_type = other RNA
tgatcgaaagcagaatgtttt

SEQ ID NO: 16370 - RNA, 21 nt, synthetic construct
  source 1..21: mol_type = other RNA
tgatgattgcctctgaaggtc

SEQ ID NO: 16371 - RNA, 21 nt, synthetic construct
  source 1..21: mol_type = other RNA
tgcaattttctcatgatcaaa

SEQ ID NO: 16372 - RNA, 21 nt, synthetic construct
  source 1..21: mol_type = other RNA
tgcatagaccatttctggaag

SEQ ID NO: 16373 - RNA, 21 nt, synthetic construct
  source 1..21: mol_type = other RNA
tgcatggcatgtattactttg

SEQ ID NO: 16374 - RNA, 21 nt, synthetic construct
  source 1..21: mol_type = other RNA
tgccatgcatagaccatttct

SEQ ID NO: 16375 - RNA, 21 nt, synthetic construct
  source 1..21: mol_type = other RNA
tgctggttatgttagatgtca

SEQ ID NO: 16376 - RNA, 21 nt, synthetic construct
  source 1..21: mol_type = other RNA
tggaagataccacaagaaaca

SEQ ID NO: 16377 - RNA, 21 nt, synthetic construct
  source 1..21: mol_type = other RNA
tggcatgtattactttggaaa

SEQ ID NO: 16378 - RNA, 21 nt, synthetic construct
  source 1..21: mol_type = other RNA
tggtatcttccagaaatggtc

SEQ ID NO: 16379 - RNA, 21 nt, synthetic construct
  source 1..21: mol_type = other RNA
tggtatttgctggttatgtta

SEQ ID NO: 16380 - RNA, 21 nt, synthetic construct
  source 1..21: mol_type = other RNA
tggtctatgcatggcatgtat

SEQ ID NO: 16381 - RNA, 21 nt, synthetic construct
  source 1..21: mol_type = other RNA
tggtgatatatacattatcct

SEQ ID NO: 16382 - RNA, 21 nt, synthetic construct
  source 1..21: mol_type = other RNA
tggtggtgatatatacattat

SEQ ID NO: 16383 - RNA, 21 nt, synthetic construct
  source 1..21: mol_type = other RNA
tggttatgttagatgtcattt

SEQ ID NO: 16384 - RNA, 21 nt, synthetic construct
  source 1..21: mol_type = other RNA
tgtaatgatgattgcctctga

SEQ ID NO: 16385 - RNA, 21 nt, synthetic construct
  source 1..21: mol_type = other RNA
tgtatatatcaccaccattac

SEQ ID NO: 16386 - RNA, 21 nt, synthetic construct
  source 1..21: mol_type = other RNA
tgtggtatcttccagaaatgg

SEQ ID NO: 16387 - RNA, 21 nt, synthetic construct
  source 1..21: mol_type = other RNA
tgtttcttgtggtatcttcca

SEQ ID NO: 16388 - RNA, 21 nt, synthetic construct
  source 1..21: mol_type = other RNA
ttacatgtttcttgtggtatc

SEQ ID NO: 16389 - RNA, 21 nt, synthetic construct
  source 1..21: mol_type = other RNA
ttactggtatttgctggttat

SEQ ID NO: 16390 - RNA, 21 nt, synthetic construct
  source 1..21: mol_type = other RNA
ttcagaggcaatcatcattac

SEQ ID NO: 16391 - RNA, 21 nt, synthetic construct
  source 1..21: mol_type = other RNA
ttccaaagtaatacatgccat

SEQ ID NO: 16392 - RNA, 21 nt, synthetic construct
  source 1..21: mol_type = other RNA
ttccagaaatggtctatgcat

SEQ ID NO: 16393 - RNA, 21 nt, synthetic construct
  source 1..21: mol_type = other RNA
ttctcatgatcaaaacattct

SEQ ID NO: 16394 - RNA, 21 nt, synthetic construct
  source 1..21: mol_type = other RNA
ttctggaagataccacaagaa

SEQ ID NO: 16395 - RNA, 21 nt, synthetic construct
  source 1..21: mol_type = other RNA
ttcttgtggtatcttccagaa

SEQ ID NO: 16396 - RNA, 21 nt, synthetic construct
  source 1..21: mol_type = other RNA
ttgatcatgagaaaattgcat

SEQ ID NO: 16397 - RNA, 21 nt, synthetic construct
  source 1..21: mol_type = other RNA
ttgctggttatgttagatgtc

SEQ ID NO: 16398 - RNA, 21 nt, synthetic construct
  source 1..21: mol_type = other RNA
ttgtggtatcttccagaaatg

SEQ ID NO: 16399 - RNA, 21 nt, synthetic construct
  source 1..21: mol_type = other RNA
tttccaaagtaatacatgcca

SEQ ID NO: 16400 - RNA, 21 nt, synthetic construct
  source 1..21: mol_type = other RNA
tttctcatgatcaaaacattc

SEQ ID NO: 16401 - RNA, 21 nt, synthetic construct
  source 1..21: mol_type = other RNA
tttctggaagataccacaaga

SEQ ID NO: 16402 - RNA, 21 nt, synthetic construct
  source 1..21: mol_type = other RNA
tttcttgtggtatcttccaga

SEQ ID NO: 16403 - RNA, 21 nt, synthetic construct
  source 1..21: mol_type = other RNA
tttgatcatgagaaaattgca

SEQ ID NO: 16404 - RNA, 21 nt, synthetic construct
  source 1..21: mol_type = other RNA
tttgctggttatgttagatgt

SEQ ID NO: 16405 - RNA, 21 nt, synthetic construct
  source 1..21: mol_type = other RNA
ttttgatcatgagaaaattgc

SEQ ID NO: 16406 - RNA, 22 nt, synthetic construct
  source 1..22: mol_type = other RNA
aaaacatgatcgaaagcagaat

SEQ ID NO: 16407 - RNA, 22 nt, synthetic construct
  source 1..22: mol_type = other RNA
aaaacattctgctttcgatcat

SEQ ID NO: 16408 - RNA, 22 nt, synthetic construct
  source 1..22: mol_type = other RNA
aaaatagaccttcagaggcaat

SEQ ID NO: 16409 - RNA, 22 nt, synthetic construct
  source 1..22: mol_type = other RNA
aaaatgacatctaacataacca

SEQ ID NO: 16410 - RNA, 22 nt, synthetic construct
  source 1..22: mol_type = other RNA
aaacatgatcgaaagcagaatg

SEQ ID NO: 16411 - RNA, 22 nt, synthetic construct
  source 1..22: mol_type = other RNA
aaacatgtaatgatgattgcct

SEQ ID NO: 16412 - RNA, 22 nt, synthetic construct
  source 1..22: mol_type = other RNA
aaagcagaatgttttgatcatg

SEQ ID NO: 16413 - RNA, 22 nt, synthetic construct
  source 1..22: mol_type = other RNA
aaaggataatgtatatatcacc

SEQ ID NO: 16414 - RNA, 22 nt, synthetic construct
  source 1..22: mol_type = other RNA
aaagtaatacatgccatgcata

SEQ ID NO: 16415 - RNA, 22 nt, synthetic construct
  source 1..22: mol_type = other RNA
aaataccagtaatggtggtgat

SEQ ID NO: 16416 - RNA, 22 nt, synthetic construct
  source 1..22: mol_type = other RNA
aaatagaccttcagaggcaatc

SEQ ID NO: 16417 - RNA, 22 nt, synthetic construct
  source 1..22: mol_type = other RNA
aaatgacatctaacataaccag

SEQ ID NO: 16418 - RNA, 22 nt, synthetic construct
  source 1..22: mol_type = other RNA
aaatgcaattttctcatgatca

SEQ ID NO: 16419 - RNA, 22 nt, synthetic construct
  source 1..22: mol_type = other RNA
aaatggtctatgcatggcatgt

SEQ ID NO: 16420 - RNA, 22 nt, synthetic construct
  source 1..22: mol_type = other RNA
aaatttccaaagtaatacatgc

SEQ ID NO: 16421 - RNA, 22 nt, synthetic construct
  source 1..22: mol_type = other RNA
aacataaccagcaaataccagt

SEQ ID NO: 16422 - RNA, 22 nt, synthetic construct
  source 1..22: mol_type = other RNA
aacatgatcgaaagcagaatgt

SEQ ID NO: 16423 - RNA, 22 nt, synthetic construct
  source 1..22: mol_type = other RNA
aacatgtaatgatgattgcctc

SEQ ID NO: 16424 - RNA, 22 nt, synthetic construct
  source 1..22: mol_type = other RNA
aaccagcaaataccagtaatgg

SEQ ID NO: 16425 - RNA, 22 nt, synthetic construct
  source 1..22: mol_type = other RNA
aagaaacatgtaatgatgattg

SEQ ID NO: 16426 - RNA, 22 nt, synthetic construct
  source 1..22: mol_type = other RNA
aagataccacaagaaacatgta

SEQ ID NO: 16427 - RNA, 22 nt, synthetic construct
  source 1..22: mol_type = other RNA
aagcagaatgttttgatcatga

SEQ ID NO: 16428 - RNA, 22 nt, synthetic construct
  source 1..22: mol_type = other RNA
aaggataatgtatatatcacca

SEQ ID NO: 16429 - RNA, 22 nt, synthetic construct
  source 1..22: mol_type = other RNA
aagtaatacatgccatgcatag

SEQ ID NO: 16430 - RNA, 22 nt, synthetic construct
  source 1..22: mol_type = other RNA
aatacatgccatgcatagacca

SEQ ID NO: 16431 - RNA, 22 nt, synthetic construct
  source 1..22: mol_type = other RNA
aataccagtaatggtggtgata

SEQ ID NO: 16432 - RNA, 22 nt, synthetic construct
  source 1..22: mol_type = other RNA
aatagaccttcagaggcaatca

SEQ ID NO: 16433 - RNA, 22 nt, synthetic construct
  source 1..22: mol_type = other RNA
aatcatcattacatgtttcttg

SEQ ID NO: 16434 - RNA, 22 nt, synthetic construct
  source 1..22: mol_type = other RNA
aatgacatctaacataaccagc

SEQ ID NO: 16435 - RNA, 22 nt, synthetic construct
  source 1..22: mol_type = other RNA
aatgatgattgcctctgaaggt

SEQ ID NO: 16436 - RNA, 22 nt, synthetic construct
  source 1..22: mol_type = other RNA
aatgcaattttctcatgatcaa

SEQ ID NO: 16437 - RNA, 22 nt, synthetic construct
  source 1..22: mol_type = other RNA
aatggtctatgcatggcatgta

SEQ ID NO: 16438 - RNA, 22 nt, synthetic construct
  source 1..22: mol_type = other RNA
aatggtggtgatatatacatta

SEQ ID NO: 16439 - RNA, 22 nt, synthetic construct
  source 1..22: mol_type = other RNA
aatgtatatatcaccaccatta

SEQ ID NO: 16440 - RNA, 22 nt, synthetic construct
  source 1..22: mol_type = other RNA
aatttccaaagtaatacatgcc

SEQ ID NO: 16441 - RNA, 22 nt, synthetic construct
  source 1..22: mol_type = other RNA
acaagaaacatgtaatgatgat

SEQ ID NO: 16442 - RNA, 22 nt, synthetic construct
  source 1..22: mol_type = other RNA
acataaccagcaaataccagta

SEQ ID NO: 16443 - RNA, 22 nt, synthetic construct
  source 1..22: mol_type = other RNA
acatctaacataaccagcaaat

SEQ ID NO: 16444 - RNA, 22 nt, synthetic construct
  source 1..22: mol_type = other RNA
acatgatcgaaagcagaatgtt

SEQ ID NO: 16445 - RNA, 22 nt, synthetic construct
  source 1..22: mol_type = other RNA
acatgccatgcatagaccattt

SEQ ID NO: 16446 - RNA, 22 nt, synthetic construct
  source 1..22: mol_type = other RNA
acatgtaatgatgattgcctct

SEQ ID NO: 16447 - RNA, 22 nt, synthetic construct
  source 1..22: mol_type = other RNA
acatgtttcttgtggtatcttc

SEQ ID NO: 16448 - RNA, 22 nt, synthetic construct
  source 1..22: mol_type = other RNA
accacaagaaacatgtaatgat

SEQ ID NO: 16449 - RNA, 22 nt, synthetic construct
  source 1..22: mol_type = other RNA
accaccattactggtatttgct

SEQ ID NO: 16450 - RNA, 22 nt, synthetic construct
  source 1..22: mol_type = other RNA
accagcaaataccagtaatggt

SEQ ID NO: 16451 - RNA, 22 nt, synthetic construct
  source 1..22: mol_type = other RNA
accagtaatggtggtgatatat

SEQ ID NO: 16452 - RNA, 22 nt, synthetic construct
  source 1..22: mol_type = other RNA
accattactggtatttgctggt

SEQ ID NO: 16453 - RNA, 22 nt, synthetic construct
  source 1..22: mol_type = other RNA
accatttctggaagataccaca

SEQ ID NO: 16454 - RNA, 22 nt, synthetic construct
  source 1..22: mol_type = other RNA
accttcagaggcaatcatcatt

SEQ ID NO: 16455 - RNA, 22 nt, synthetic construct
  source 1..22: mol_type = other RNA
actggtatttgctggttatgtt

SEQ ID NO: 16456 - RNA, 22 nt, synthetic construct
  source 1..22: mol_type = other RNA
agaaacatgtaatgatgattgc

SEQ ID NO: 16457 - RNA, 22 nt, synthetic construct
  source 1..22: mol_type = other RNA
agaaatggtctatgcatggcat

SEQ ID NO: 16458 - RNA, 22 nt, synthetic construct
  source 1..22: mol_type = other RNA
agaatgttttgatcatgagaaa

SEQ ID NO: 16459 - RNA, 22 nt, synthetic construct
  source 1..22: mol_type = other RNA
agaccatttctggaagatacca

SEQ ID NO: 16460 - RNA, 22 nt, synthetic construct
  source 1..22: mol_type = other RNA
agaccttcagaggcaatcatca

SEQ ID NO: 16461 - RNA, 22 nt, synthetic construct
  source 1..22: mol_type = other RNA
agaggcaatcatcattacatgt

SEQ ID NO: 16462 - RNA, 22 nt, synthetic construct
  source 1..22: mol_type = other RNA
agataccacaagaaacatgtaa

SEQ ID NO: 16463 - RNA, 22 nt, synthetic construct
  source 1..22: mol_type = other RNA
agcaaataccagtaatggtggt

SEQ ID NO: 16464 - RNA, 22 nt, synthetic construct
  source 1..22: mol_type = other RNA
agcagaatgttttgatcatgag

SEQ ID NO: 16465 - RNA, 22 nt, synthetic construct
  source 1..22: mol_type = other RNA
aggaaaatagaccttcagaggc

SEQ ID NO: 16466 - RNA, 22 nt, synthetic construct
  source 1..22: mol_type = other RNA
aggataatgtatatatcaccac

SEQ ID NO: 16467 - RNA, 22 nt, synthetic construct
  source 1..22: mol_type = other RNA
aggcaatcatcattacatgttt

SEQ ID NO: 16468 - RNA, 22 nt, synthetic construct
  source 1..22: mol_type = other RNA
agtaatacatgccatgcataga

SEQ ID NO: 16469 - RNA, 22 nt, synthetic construct
  source 1..22: mol_type = other RNA
agtaatggtggtgatatataca

SEQ ID NO: 16470 - RNA, 22 nt, synthetic construct
  source 1..22: mol_type = other RNA
ataaccagcaaataccagtaat

SEQ ID NO: 16471 - RNA, 22 nt, synthetic construct
  source 1..22: mol_type = other RNA
ataatgtatatatcaccaccat

SEQ ID NO: 16472 - RNA, 22 nt, synthetic construct
  source 1..22: mol_type = other RNA
atacatgccatgcatagaccat

SEQ ID NO: 16473 - RNA, 22 nt, synthetic construct
  source 1..22: mol_type = other RNA
ataccacaagaaacatgtaatg

SEQ ID NO: 16474 - RNA, 22 nt, synthetic construct
  source 1..22: mol_type = other RNA
ataccagtaatggtggtgatat

SEQ ID NO: 16475 - RNA, 22 nt, synthetic construct
  source 1..22: mol_type = other RNA
atagaccatttctggaagatac

SEQ ID NO: 16476 - RNA, 22 nt, synthetic construct
  source 1..22: mol_type = other RNA
atagaccttcagaggcaatcat

SEQ ID NO: 16477 - RNA, 22 nt, synthetic construct
  source 1..22: mol_type = other RNA
atatatcaccaccattactggt

SEQ ID NO: 16478 - RNA, 22 nt, synthetic construct
  source 1..22: mol_type = other RNA
atatcaccaccattactggtat

SEQ ID NO: 16479 - RNA, 22 nt, synthetic construct
  source 1..22: mol_type = other RNA
atcaaaacattctgctttcgat

SEQ ID NO: 16480 - RNA, 22 nt, synthetic construct
  source 1..22: mol_type = other RNA
atcaccaccattactggtattt

SEQ ID NO: 16481 - RNA, 22 nt, synthetic construct
  source 1..22: mol_type = other RNA
atcatcattacatgtttcttgt

SEQ ID NO: 16482 - RNA, 22 nt, synthetic construct
  source 1..22: mol_type = other RNA
atcattacatgtttcttgtggt

SEQ ID NO: 16483 - RNA, 22 nt, synthetic construct
  source 1..22: mol_type = other RNA
atcgaaagcagaatgttttgat

SEQ ID NO: 16484 - RNA, 22 nt, synthetic construct
  source 1..22: mol_type = other RNA
atctaacataaccagcaaatac

SEQ ID NO: 16485 - RNA, 22 nt, synthetic construct
  source 1..22: mol_type = other RNA
atcttccagaaatggtctatgc

SEQ ID NO: 16486 - RNA, 22 nt, synthetic construct
  source 1..22: mol_type = other RNA
atgacatctaacataaccagca

SEQ ID NO: 16487 - RNA, 22 nt, synthetic construct
  source 1..22: mol_type = other RNA
atgatcaaaacattctgctttc

SEQ ID NO: 16488 - RNA, 22 nt, synthetic construct
  source 1..22: mol_type = other RNA
atgatcgaaagcagaatgtttt

SEQ ID NO: 16489 - RNA, 22 nt, synthetic construct
  source 1..22: mol_type = other RNA
atgatgattgcctctgaaggtc

SEQ ID NO: 16490 - RNA, 22 nt, synthetic construct
  source 1..22: mol_type = other RNA
atgcaattttctcatgatcaaa

SEQ ID NO: 16491 - RNA, 22 nt, synthetic construct
  source 1..22: mol_type = other RNA
atgcatagaccatttctggaag

SEQ ID NO: 16492 - RNA, 22 nt, synthetic construct
  source 1..22: mol_type = other RNA
atgcatggcatgtattactttg

SEQ ID NO: 16493 - RNA, 22 nt, synthetic construct
  source 1..22: mol_type = other RNA
atgccatgcatagaccatttct

SEQ ID NO: 16494 - RNA, 22 nt, synthetic construct
  source 1..22: mol_type = other RNA
atggcatgtattactttggaaa

SEQ ID NO: 16495 - RNA, 22 nt, synthetic construct
  source 1..22: mol_type = other RNA
atggtctatgcatggcatgtat

SEQ ID NO: 16496 - RNA, 22 nt, synthetic construct
  source 1..22: mol_type = other RNA
atggtggtgatatatacattat

SEQ ID NO: 16497 - RNA, 22 nt, synthetic construct
  source 1..22: mol_type = other RNA
atgtaatgatgattgcctctga

SEQ ID NO: 16498 - RNA, 22 nt, synthetic construct
  source 1..22: mol_type = other RNA
atgtatatatcaccaccattac

SEQ ID NO: 16499 - RNA, 22 nt, synthetic construct
  source 1..22: mol_type = other RNA
atgtttcttgtggtatcttcca

SEQ ID NO: 16500 - RNA, 22 nt, synthetic construct
  source 1..22: mol_type = other RNA
attacatgtttcttgtggtatc

SEQ ID NO: 16501 - RNA, 22 nt, synthetic construct
  source 1..22: mol_type = other RNA
attactggtatttgctggttat

SEQ ID NO: 16502 - RNA, 22 nt, synthetic construct
  source 1..22: mol_type = other RNA
atttccaaagtaatacatgcca

SEQ ID NO: 16503 - RNA, 22 nt, synthetic construct
  source 1..22: mol_type = other RNA
atttctggaagataccacaaga

SEQ ID NO: 16504 - RNA, 22 nt, synthetic construct
  source 1..22: mol_type = other RNA
atttgctggttatgttagatgt

SEQ ID NO: 16505 - RNA, 22 nt, synthetic construct
  source 1..22: mol_type = other RNA
caaaacatgatcgaaagcagaa

SEQ ID NO: 16506 - RNA, 22 nt, synthetic construct
  source 1..22: mol_type = other RNA
caaaacattctgctttcgatca

SEQ ID NO: 16507 - RNA, 22 nt, synthetic construct
  source 1..22: mol_type = other RNA
caaagtaatacatgccatgcat

SEQ ID NO: 16508 - RNA, 22 nt, synthetic construct
  source 1..22: mol_type = other RNA
caaataccagtaatggtggtga

SEQ ID NO: 16509 - RNA, 22 nt, synthetic construct
  source 1..22: mol_type = other RNA
caagaaacatgtaatgatgatt

SEQ ID NO: 16510 - RNA, 22 nt, synthetic construct
  source 1..22: mol_type = other RNA
caatcatcattacatgtttctt

SEQ ID NO: 16511 - RNA, 22 nt, synthetic construct
  source 1..22: mol_type = other RNA
caattttctcatgatcaaaaca

SEQ ID NO: 16512 - RNA, 22 nt, synthetic construct
  source 1..22: mol_type = other RNA
cacaagaaacatgtaatgatga

SEQ ID NO: 16513 - RNA, 22 nt, synthetic construct
  source 1..22: mol_type = other RNA
caccaccattactggtatttgc

SEQ ID NO: 16514 - RNA, 22 nt, synthetic construct
  source 1..22: mol_type = other RNA
caccattactggtatttgctgg

SEQ ID NO: 16515 - RNA, 22 nt, synthetic construct
  source 1..22: mol_type = other RNA
cagaaatggtctatgcatggca

SEQ ID NO: 16516 - RNA, 22 nt, synthetic construct
  source 1..22: mol_type = other RNA
cagaatgttttgatcatgagaa

SEQ ID NO: 16517 - RNA, 22 nt, synthetic construct
  source 1..22: mol_type = other RNA
cagaggcaatcatcattacatg

SEQ ID NO: 16518 - RNA, 22 nt, synthetic construct
  source 1..22: mol_type = other RNA
cagcaaataccagtaatggtgg

SEQ ID NO: 16519 - RNA, 22 nt, synthetic construct
  source 1..22: mol_type = other RNA
cagtaatggtggtgatatatac

SEQ ID NO: 16520 - RNA, 22 nt, synthetic construct
  source 1..22: mol_type = other RNA
cataaccagcaaataccagtaa

SEQ ID NO: 16521 - RNA, 22 nt, synthetic construct
  source 1..22: mol_type = other RNA
catagaccatttctggaagata

SEQ ID NO: 16522 - RNA, 22 nt, synthetic construct
  source 1..22: mol_type = other RNA
catcattacatgtttcttgtgg

SEQ ID NO: 16523 - RNA, 22 nt, synthetic construct
  source 1..22: mol_type = other RNA
catctaacataaccagcaaata

SEQ ID NO: 16524 - RNA, 22 nt, synthetic construct
  source 1..22: mol_type = other RNA
catgatcaaaacattctgcttt

SEQ ID NO: 16525 - RNA, 22 nt, synthetic construct
  source 1..22: mol_type = other RNA
catgatcgaaagcagaatgttt

SEQ ID NO: 16526 - RNA, 22 nt, synthetic construct
  source 1..22: mol_type = other RNA
catgcatagaccatttctggaa

SEQ ID NO: 16527 - RNA, 22 nt, synthetic construct
  source 1..22: mol_type = other RNA
catgccatgcatagaccatttc

SEQ ID NO: 16528 - RNA, 22 nt, synthetic construct
  source 1..22: mol_type = other RNA
catggcatgtattactttggaa

SEQ ID NO: 16529 - RNA, 22 nt, synthetic construct
  source 1..22: mol_type = other RNA
catgtaatgatgattgcctctg

SEQ ID NO: 16530 - RNA, 22 nt, synthetic construct
  source 1..22: mol_type = other RNA
catgtttcttgtggtatcttcc

SEQ ID NO: 16531 - RNA, 22 nt, synthetic construct
  source 1..22: mol_type = other RNA
cattacatgtttcttgtggtat

SEQ ID NO: 16532 - RNA, 22 nt, synthetic construct
  source 1..22: mol_type = other RNA
cattactggtatttgctggtta

SEQ ID NO: 16533 - RNA, 22 nt, synthetic construct
  source 1..22: mol_type = other RNA
catttctggaagataccacaag

SEQ ID NO: 16534 - RNA, 22 nt, synthetic construct
  source 1..22: mol_type = other RNA
ccaaagtaatacatgccatgca

SEQ ID NO: 16535 - RNA, 22 nt, synthetic construct
  source 1..22: mol_type = other RNA
ccacaagaaacatgtaatgatg

SEQ ID NO: 16536 - RNA, 22 nt, synthetic construct
  source 1..22: mol_type = other RNA
ccaccattactggtatttgctg

SEQ ID NO: 16537 - RNA, 22 nt, synthetic construct
  source 1..22: mol_type = other RNA
ccagaaatggtctatgcatggc

SEQ ID NO: 16538 - RNA, 22 nt, synthetic construct
  source 1..22: mol_type = other RNA
ccagcaaataccagtaatggtg

SEQ ID NO: 16539 - RNA, 22 nt, synthetic construct
  source 1..22: mol_type = other RNA
ccagtaatggtggtgatatata

SEQ ID NO: 16540 - RNA, 22 nt, synthetic construct
  source 1..22: mol_type = other RNA
ccatgcatagaccatttctgga

SEQ ID NO: 16541 - RNA, 22 nt, synthetic construct
  source 1..22: mol_type = other RNA
ccattactggtatttgctggtt

SEQ ID NO: 16542 - RNA, 22 nt, synthetic construct
  source 1..22: mol_type = other RNA
ccatttctggaagataccacaa

SEQ ID NO: 16543 - RNA, 22 nt, synthetic construct
  source 1..22: mol_type = other RNA
ccttcagaggcaatcatcatta

SEQ ID NO: 16544 - RNA, 22 nt, synthetic construct
  source 1..22: mol_type = other RNA
cgaaagcagaatgttttgatca

SEQ ID NO: 16545 - RNA, 22 nt, synthetic construct
  source 1..22: mol_type = other RNA
ctaacataaccagcaaatacca

SEQ ID NO: 16546 - RNA, 22 nt, synthetic construct
  source 1..22: mol_type = other RNA
ctatgcatggcatgtattactt

SEQ ID NO: 16547 - RNA, 22 nt, synthetic construct
  source 1..22: mol_type = other RNA
ctcatgatcaaaacattctgct

SEQ ID NO: 16548 - RNA, 22 nt, synthetic construct
  source 1..22: mol_type = other RNA
ctggaagataccacaagaaaca

SEQ ID NO: 16549 - RNA, 22 nt, synthetic construct
  source 1..22: mol_type = other RNA
ctggtatttgctggttatgtta

SEQ ID NO: 16550 - RNA, 22 nt, synthetic construct
  source 1..22: mol_type = other RNA
ctggttatgttagatgtcattt

SEQ ID NO: 16551 - RNA, 22 nt, synthetic construct
  source 1..22: mol_type = other RNA
cttcagaggcaatcatcattac

SEQ ID NO: 16552 - RNA, 22 nt, synthetic construct
  source 1..22: mol_type = other RNA
cttccagaaatggtctatgcat

SEQ ID NO: 16553 - RNA, 22 nt, synthetic construct
  source 1..22: mol_type = other RNA
cttgtggtatcttccagaaatg

SEQ ID NO: 16554 - RNA, 22 nt, synthetic construct
  source 1..22: mol_type = other RNA
gaaaatagaccttcagaggcaa

SEQ ID NO: 16555 - RNA, 22 nt, synthetic construct
  source 1..22: mol_type = other RNA
gaaacatgtaatgatgattgcc

SEQ ID NO: 16556 - RNA, 22 nt, synthetic construct
  source 1..22: mol_type = other RNA
gaaagcagaatgttttgatcat

SEQ ID NO: 16557 - RNA, 22 nt, synthetic construct
  source 1..22: mol_type = other RNA
gaaatggtctatgcatggcatg

SEQ ID NO: 16558 - RNA, 22 nt, synthetic construct
  source 1..22: mol_type = other RNA
gaagataccacaagaaacatgt

SEQ ID NO: 16559 - RNA, 22 nt, synthetic construct
  source 1..22: mol_type = other RNA
gaatgttttgatcatgagaaaa

SEQ ID NO: 16560 - RNA, 22 nt, synthetic construct
  source 1..22: mol_type = other RNA
gacatctaacataaccagcaaa

SEQ ID NO: 16561 - RNA, 22 nt, synthetic construct
  source 1..22: mol_type = other RNA
gaccatttctggaagataccac

SEQ ID NO: 16562 - RNA, 22 nt, synthetic construct
  source 1..22: mol_type = other RNA
gaccttcagaggcaatcatcat

SEQ ID NO: 16563 - RNA, 22 nt, synthetic construct
  source 1..22: mol_type = other RNA
gaggaaaatagaccttcagagg

SEQ ID NO: 16564 - RNA, 22 nt, synthetic construct
  source 1..22: mol_type = other RNA
gaggcaatcatcattacatgtt

SEQ ID NO: 16565 - RNA, 22 nt, synthetic construct
  source 1..22: mol_type = other RNA
gataatgtatatatcaccacca

SEQ ID NO: 16566 - RNA, 22 nt, synthetic construct
  source 1..22: mol_type = other RNA
gataccacaagaaacatgtaat

SEQ ID NO: 16567 - RNA, 22 nt, synthetic construct
  source 1..22: mol_type = other RNA
gatcaaaacattctgctttcga

SEQ ID NO: 16568 - RNA, 22 nt, synthetic construct
  source 1..22: mol_type = other RNA
gatcatgagaaaattgcattta

SEQ ID NO: 16569 - RNA, 22 nt, synthetic construct
  source 1..22: mol_type = other RNA
gatcgaaagcagaatgttttga

SEQ ID NO: 16570 - RNA, 22 nt, synthetic construct
  source 1..22: mol_type = other RNA
gatgattgcctctgaaggtcta

SEQ ID NO: 16571 - RNA, 22 nt, synthetic construct
  source 1..22: mol_type = other RNA
gcaaaacatgatcgaaagcaga

SEQ ID NO: 16572 - RNA, 22 nt, synthetic construct
  source 1..22: mol_type = other RNA
gcaaataccagtaatggtggtg

SEQ ID NO: 16573 - RNA, 22 nt, synthetic construct
  source 1..22: mol_type = other RNA
gcaatcatcattacatgtttct

SEQ ID NO: 16574 - RNA, 22 nt, synthetic construct
  source 1..22: mol_type = other RNA
gcaattttctcatgatcaaaac

SEQ ID NO: 16575 - RNA, 22 nt, synthetic construct
  source 1..22: mol_type = other RNA
gcagaatgttttgatcatgaga

SEQ ID NO: 16576 - RNA, 22 nt, synthetic construct
  source 1..22: mol_type = other RNA
gcatagaccatttctggaagat

SEQ ID NO: 16577 - RNA, 22 nt, synthetic construct
  source 1..22: mol_type = other RNA
gcatggcatgtattactttgga

SEQ ID NO: 16578 - RNA, 22 nt, synthetic construct
  source 1..22: mol_type = other RNA
gcatgtattactttggaaattt

SEQ ID NO: 16579 - RNA, 22 nt, synthetic construct
  source 1..22: mol_type = other RNA
gccatgcatagaccatttctgg

SEQ ID NO: 16580 - RNA, 22 nt, synthetic construct
  source 1..22: mol_type = other RNA
gctggttatgttagatgtcatt

SEQ ID NO: 16581 - RNA, 22 nt, synthetic construct
  source 1..22: mol_type = other RNA
ggaaaatagaccttcagaggca

SEQ ID NO: 16582 - RNA, 22 nt, synthetic construct
  source 1..22: mol_type = other RNA
ggaagataccacaagaaacatg

SEQ ID NO: 16583 - RNA, 22 nt, synthetic construct
  source 1..22: mol_type = other RNA
ggataatgtatatatcaccacc

SEQ ID NO: 16584 - RNA, 22 nt, synthetic construct
  source 1..22: mol_type = other RNA
ggcaaaacatgatcgaaagcag

SEQ ID NO: 16585 - RNA, 22 nt, synthetic construct
  source 1..22: mol_type = other RNA
ggcaatcatcattacatgtttc

SEQ ID NO: 16586 - RNA, 22 nt, synthetic construct
  source 1..22: mol_type = other RNA
ggcatgtattactttggaaatt

SEQ ID NO: 16587 - RNA, 22 nt, synthetic construct
  source 1..22: mol_type = other RNA
ggtatcttccagaaatggtcta

SEQ ID NO: 16588 - RNA, 22 nt, synthetic construct
  source 1..22: mol_type = other RNA
ggtatttgctggttatgttaga

SEQ ID NO: 16589 - RNA, 22 nt, synthetic construct
  source 1..22: mol_type = other RNA
ggtctatgcatggcatgtatta

SEQ ID NO: 16590 - RNA, 22 nt, synthetic construct
  source 1..22: mol_type = other RNA
ggtgatatatacattatccttt

SEQ ID NO: 16591 - RNA, 22 nt, synthetic construct
  source 1..22: mol_type = other RNA
ggtggtgatatatacattatcc

SEQ ID NO: 16592 - RNA, 22 nt, synthetic construct
  source 1..22: mol_type = other RNA
ggttatgttagatgtcatttta

SEQ ID NO: 16593 - RNA, 22 nt, synthetic construct
  source 1..22: mol_type = other RNA
gtaatacatgccatgcatagac

SEQ ID NO: 16594 - RNA, 22 nt, synthetic construct
  source 1..22: mol_type = other RNA
gtaatgatgattgcctctgaag

SEQ ID NO: 16595 - RNA, 22 nt, synthetic construct
  source 1..22: mol_type = other RNA
gtaatggtggtgatatatacat

SEQ ID NO: 16596 - RNA, 22 nt, synthetic construct
  source 1..22: mol_type = other RNA
gtatatatcaccaccattactg

SEQ ID NO: 16597 - RNA, 22 nt, synthetic construct
  source 1..22: mol_type = other RNA
gtatcttccagaaatggtctat

SEQ ID NO: 16598 - RNA, 22 nt, synthetic construct
  source 1..22: mol_type = other RNA
gtatttgctggttatgttagat

SEQ ID NO: 16599 - RNA, 22 nt, synthetic construct
  source 1..22: mol_type = other RNA
gtctatgcatggcatgtattac

SEQ ID NO: 16600 - RNA, 22 nt, synthetic construct
  source 1..22: mol_type = other RNA
gtggtatcttccagaaatggtc

SEQ ID NO: 16601 - RNA, 22 nt, synthetic construct
  source 1..22: mol_type = other RNA
gtggtgatatatacattatcct

SEQ ID NO: 16602 - RNA, 22 nt, synthetic construct
  source 1..22: mol_type = other RNA
gtttcttgtggtatcttccaga

SEQ ID NO: 16603 - RNA, 22 nt, synthetic construct
  source 1..22: mol_type = other RNA
gttttgatcatgagaaaattgc

SEQ ID NO: 16604 - RNA, 22 nt, synthetic construct
  source 1..22: mol_type = other RNA
taaaatgacatctaacataacc

SEQ ID NO: 16605 - RNA, 22 nt, synthetic construct
  source 1..22: mol_type = other RNA
taaatgcaattttctcatgatc

SEQ ID NO: 16606 - RNA, 22 nt, synthetic construct
  source 1..22: mol_type = other RNA
taacataaccagcaaataccag

SEQ ID NO: 16607 - RNA, 22 nt, synthetic construct
  source 1..22: mol_type = other RNA
taaccagcaaataccagtaatg

SEQ ID NO: 16608 - RNA, 22 nt, synthetic construct
  source 1..22: mol_type = other RNA
taatacatgccatgcatagacc

SEQ ID NO: 16609 - RNA, 22 nt, synthetic construct
  source 1..22: mol_type = other RNA
taatgatgattgcctctgaagg

SEQ ID NO: 16610 - RNA, 22 nt, synthetic construct
  source 1..22: mol_type = other RNA
taatggtggtgatatatacatt

SEQ ID NO: 16611 - RNA, 22 nt, synthetic construct
  source 1..22: mol_type = other RNA
taatgtatatatcaccaccatt

SEQ ID NO: 16612 - RNA, 22 nt, synthetic construct
  source 1..22: mol_type = other RNA
tacatgccatgcatagaccatt

SEQ ID NO: 16613 - RNA, 22 nt, synthetic construct
  source 1..22: mol_type = other RNA
tacatgtttcttgtggtatctt

SEQ ID NO: 16614 - RNA, 22 nt, synthetic construct
  source 1..22: mol_type = other RNA
taccacaagaaacatgtaatga

SEQ ID NO: 16615 - RNA, 22 nt, synthetic construct
  source 1..22: mol_type = other RNA
taccagtaatggtggtgatata

SEQ ID NO: 16616 - RNA, 22 nt, synthetic construct
  source 1..22: mol_type = other RNA
tactggtatttgctggttatgt

SEQ ID NO: 16617 - RNA, 22 nt, synthetic construct
  source 1..22: mol_type = other RNA
tagaccatttctggaagatacc

SEQ ID NO: 16618 - RNA, 22 nt, synthetic construct
  source 1..22: mol_type = other RNA
tagaccttcagaggcaatcatc

SEQ ID NO: 16619 - RNA, 22 nt, synthetic construct
  source 1..22: mol_type = other RNA
tatatatcaccaccattactgg

SEQ ID NO: 16620 - RNA, 22 nt, synthetic construct
  source 1..22: mol_type = other RNA
tatatcaccaccattactggta

SEQ ID NO: 16621 - RNA, 22 nt, synthetic construct
  source 1..22: mol_type = other RNA
tatcaccaccattactggtatt

SEQ ID NO: 16622 - RNA, 22 nt, synthetic construct
  source 1..22: mol_type = other RNA
tatcttccagaaatggtctatg

SEQ ID NO: 16623 - RNA, 22 nt, synthetic construct
  source 1..22: mol_type = other RNA
tatgcatggcatgtattacttt

SEQ ID NO: 16624 - RNA, 22 nt, synthetic construct
  source 1..22: mol_type = other RNA
tatttgctggttatgttagatg

SEQ ID NO: 16625 - RNA, 22 nt, synthetic construct
  source 1..22: mol_type = other RNA
tcaaaacattctgctttcgatc

SEQ ID NO: 16626 - RNA, 22 nt, synthetic construct
  source 1..22: mol_type = other RNA
tcaccaccattactggtatttg

SEQ ID NO: 16627 - RNA, 22 nt, synthetic construct
  source 1..22: mol_type = other RNA
tcagaggcaatcatcattacat

SEQ ID NO: 16628 - RNA, 22 nt, synthetic construct
  source 1..22: mol_type = other RNA
tcatcattacatgtttcttgtg

SEQ ID NO: 16629 - RNA, 22 nt, synthetic construct
  source 1..22: mol_type = other RNA
tcatgatcaaaacattctgctt

SEQ ID NO: 16630 - RNA, 22 nt, synthetic construct
  source 1..22: mol_type = other RNA
tcattacatgtttcttgtggta

SEQ ID NO: 16631 - RNA, 22 nt, synthetic construct
  source 1..22: mol_type = other RNA
tccaaagtaatacatgccatgc

SEQ ID NO: 16632 - RNA, 22 nt, synthetic construct
  source 1..22: mol_type = other RNA
tccagaaatggtctatgcatgg

SEQ ID NO: 16633 - RNA, 22 nt, synthetic construct
  source 1..22: mol_type = other RNA
tcgaaagcagaatgttttgatc

SEQ ID NO: 16634 - RNA, 22 nt, synthetic construct
  source 1..22: mol_type = other RNA
tctaacataaccagcaaatacc

SEQ ID NO: 16635 - RNA, 22 nt, synthetic construct
  source 1..22: mol_type = other RNA
tctatgcatggcatgtattact

SEQ ID NO: 16636 - RNA, 22 nt, synthetic construct
  source 1..22: mol_type = other RNA
tctcatgatcaaaacattctgc

SEQ ID NO: 16637 - RNA, 22 nt, synthetic construct
  source 1..22: mol_type = other RNA
tctggaagataccacaagaaac

SEQ ID NO: 16638 - RNA, 22 nt, synthetic construct
  source 1..22: mol_type = other RNA
tcttccagaaatggtctatgca

SEQ ID NO: 16639 - RNA, 22 nt, synthetic construct
  source 1..22: mol_type = other RNA
tcttgtggtatcttccagaaat

SEQ ID NO: 16640 - RNA, 22 nt, synthetic construct
  source 1..22: mol_type = other RNA
tgacatctaacataaccagcaa

SEQ ID NO: 16641 - RNA, 22 nt, synthetic construct
  source 1..22: mol_type = other RNA
tgatcaaaacattctgctttcg

SEQ ID NO: 16642 - RNA, 22 nt, synthetic construct
  source 1..22: mol_type = other RNA
tgatcatgagaaaattgcattt

SEQ ID NO: 16643 - RNA, 22 nt, synthetic construct
  source 1..22: mol_type = other RNA
tgatcgaaagcagaatgttttg

SEQ ID NO: 16644 - RNA, 22 nt, synthetic construct
  source 1..22: mol_type = other RNA
tgatgattgcctctgaaggtct

SEQ ID NO: 16645 - RNA, 22 nt, synthetic construct
  source 1..22: mol_type = other RNA
tgcaattttctcatgatcaaaa

SEQ ID NO: 16646 - RNA, 22 nt, synthetic construct
  source 1..22: mol_type = other RNA
tgcatagaccatttctggaaga

SEQ ID NO: 16647 - RNA, 22 nt, synthetic construct
  source 1..22: mol_type = other RNA
tgcatggcatgtattactttgg

SEQ ID NO: 16648 - RNA, 22 nt, synthetic construct
  source 1..22: mol_type = other RNA
tgccatgcatagaccatttctg

SEQ ID NO: 16649 - RNA, 22 nt, synthetic construct
  source 1..22: mol_type = other RNA
tgctggttatgttagatgtcat

SEQ ID NO: 16650 - RNA, 22 nt, synthetic construct
  source 1..22: mol_type = other RNA
tggaagataccacaagaaacat

SEQ ID NO: 16651 - RNA, 22 nt, synthetic construct
  source 1..22: mol_type = other RNA
tggcatgtattactttggaaat

SEQ ID NO: 16652 - RNA, 22 nt, synthetic construct
  source 1..22: mol_type = other RNA
tggtatcttccagaaatggtct

SEQ ID NO: 16653 - RNA, 22 nt, synthetic construct
  source 1..22: mol_type = other RNA
tggtatttgctggttatgttag

SEQ ID NO: 16654 - RNA, 22 nt, synthetic construct
  source 1..22: mol_type = other RNA
tggtctatgcatggcatgtatt

SEQ ID NO: 16655 - RNA, 22 nt, synthetic construct
  source 1..22: mol_type = other RNA
tggtgatatatacattatcctt

SEQ ID NO: 16656 - RNA, 22 nt, synthetic construct
  source 1..22: mol_type = other RNA
tggtggtgatatatacattatc

SEQ ID NO: 16657 - RNA, 22 nt, synthetic construct
  source 1..22: mol_type = other RNA
tggttatgttagatgtcatttt

SEQ ID NO: 16658 - RNA, 22 nt, synthetic construct
  source 1..22: mol_type = other RNA
tgtaatgatgattgcctctgaa

SEQ ID NO: 16659 - RNA, 22 nt, synthetic construct
  source 1..22: mol_type = other RNA
tgtatatatcaccaccattact

SEQ ID NO: 16660 - RNA, 22 nt, synthetic construct
  source 1..22: mol_type = other RNA
tgtggtatcttccagaaatggt

SEQ ID NO: 16661 - RNA, 22 nt, synthetic construct
  source 1..22: mol_type = other RNA
tgtttcttgtggtatcttccag

SEQ ID NO: 16662 - RNA, 22 nt, synthetic construct
  source 1..22: mol_type = other RNA
tgttttgatcatgagaaaattg

SEQ ID NO: 16663 - RNA, 22 nt, synthetic construct
  source 1..22: mol_type = other RNA
ttacatgtttcttgtggtatct

SEQ ID NO: 16664 - RNA, 22 nt, synthetic construct
  source 1..22: mol_type = other RNA
ttactggtatttgctggttatg

SEQ ID NO: 16665 - RNA, 22 nt, synthetic construct
  source 1..22: mol_type = other RNA
ttcagaggcaatcatcattaca

SEQ ID NO: 16666 - RNA, 22 nt, synthetic construct
  source 1..22: mol_type = other RNA
ttccaaagtaatacatgccatg

SEQ ID NO: 16667 - RNA, 22 nt, synthetic construct
  source 1..22: mol_type = other RNA
ttccagaaatggtctatgcatg

SEQ ID NO: 16668 - RNA, 22 nt, synthetic construct
  source 1..22: mol_type = other RNA
ttctcatgatcaaaacattctg

SEQ ID NO: 16669 - RNA, 22 nt, synthetic construct
  source 1..22: mol_type = other RNA
ttctggaagataccacaagaaa

SEQ ID NO: 16670 - RNA, 22 nt, synthetic construct
  source 1..22: mol_type = other RNA
ttcttgtggtatcttccagaaa

SEQ ID NO: 16671 - RNA, 22 nt, synthetic construct
  source 1..22: mol_type = other RNA
ttgatcatgagaaaattgcatt

SEQ ID NO: 16672 - RNA, 22 nt, synthetic construct
  source 1..22: mol_type = other RNA
ttgctggttatgttagatgtca

SEQ ID NO: 16673 - RNA, 22 nt, synthetic construct
  source 1..22: mol_type = other RNA
ttgtggtatcttccagaaatgg

SEQ ID NO: 16674 - RNA, 22 nt, synthetic construct
  source 1..22: mol_type = other RNA
tttccaaagtaatacatgccat

SEQ ID NO: 16675 - RNA, 22 nt, synthetic construct
  source 1..22: mol_type = other RNA
tttctcatgatcaaaacattct

SEQ ID NO: 16676 - RNA, 22 nt, synthetic construct
  source 1..22: mol_type = other RNA
tttctggaagataccacaagaa

SEQ ID NO: 16677 - RNA, 22 nt, synthetic construct
  source 1..22: mol_type = other RNA
tttcttgtggtatcttccagaa

SEQ ID NO: 16678 - RNA, 22 nt, synthetic construct
  source 1..22: mol_type = other RNA
tttgatcatgagaaaattgcat

SEQ ID NO: 16679 - RNA, 22 nt, synthetic construct
  source 1..22: mol_type = other RNA
tttgctggttatgttagatgtc

SEQ ID NO: 16680 - RNA, 22 nt, synthetic construct
  source 1..22: mol_type = other RNA
ttttctcatgatcaaaacattc

SEQ ID NO: 16681 - RNA, 22 nt, synthetic construct
  source 1..22: mol_type = other RNA
ttttgatcatgagaaaattgca

SEQ ID NO: 16682 - RNA, 20 nt, synthetic construct
  source 1..20: mol_type = other RNA
aaaaaatcaggtcttcatta

SEQ ID NO: 16683 - RNA, 20 nt, synthetic construct
  source 1..20: mol_type = other RNA
aaaaacaaagaaacaaaacc

SEQ ID NO: 16684 - RNA, 20 nt, synthetic construct
  source 1..20: mol_type = other RNA
aaaaatcaggtcttcattag

SEQ ID NO: 16685 - RNA, 20 nt, synthetic construct
  source 1..20: mol_type = other RNA
aaaaattaatttatgcccac

SEQ ID NO: 16686 - RNA, 20 nt, synthetic construct
  source 1..20: mol_type = other RNA
aaaacaaaaacaaaacccac

SEQ ID NO: 16687 - RNA, 20 nt, synthetic construct
  source 1..20: mol_type = other RNA
aaaacaaagaaacaaaacct

SEQ ID NO: 16688 - RNA, 20 nt, synthetic construct
  source 1..20: mol_type = other RNA
aaaacctaaatgcatacaag

SEQ ID NO: 16689 - RNA, 20 nt, synthetic construct
  source 1..20: mol_type = other RNA
aaaacgcaaatcccactgtc

SEQ ID NO: 16690 - RNA, 20 nt, synthetic construct
  source 1..20: mol_type = other RNA
aaaagattacagtgatgctc

SEQ ID NO: 16691 - RNA, 20 nt, synthetic construct
  source 1..20: mol_type = other RNA
aaaagctaagagagctcttt

SEQ ID NO: 16692 - RNA, 20 nt, synthetic construct
  source 1..20: mol_type = other RNA
aaaaggcagctactcctcct

SEQ ID NO: 16693 - RNA, 20 nt, synthetic construct
  source 1..20: mol_type = other RNA
aaaagtcataaagccagtaa

SEQ ID NO: 16694 - RNA, 20 nt, synthetic construct
  source 1..20: mol_type = other RNA
aaaatacaacagggataggt

SEQ ID NO: 16695 - RNA, 20 nt, synthetic construct
  source 1..20: mol_type = other RNA
aaaatcaggtcttcattaga

SEQ ID NO: 16696 - RNA, 20 nt, synthetic construct
  source 1..20: mol_type = other RNA
aaaatcttgccgccttccct

SEQ ID NO: 16697 - RNA, 20 nt, synthetic construct
  source 1..20: mol_type = other RNA
aaaatgaagagaagtgttag

SEQ ID NO: 16698 - RNA, 20 nt, synthetic construct
  source 1..20: mol_type = other RNA
aaaatgagaggcatgactag

SEQ ID NO: 16699 - RNA, 20 nt, synthetic construct
  source 1..20: mol_type = other RNA
aaaattaatttatgcccaca

SEQ ID NO: 16700 - RNA, 20 nt, synthetic construct
  source 1..20: mol_type = other RNA
aaacaaaaacaaaacccaca

SEQ ID NO: 16701 - RNA, 20 nt, synthetic construct
  source 1..20: mol_type = other RNA
aaacaaaacctaaatgcata

SEQ ID NO: 16702 - RNA, 20 nt, synthetic construct
  source 1..20: mol_type = other RNA
aaacaaagaaacaaaaccta

SEQ ID NO: 16703 - RNA, 20 nt, synthetic construct
  source 1..20: mol_type = other RNA
aaacaccctatcattaagga

SEQ ID NO: 16704 - RNA, 20 nt, synthetic construct
  source 1..20: mol_type = other RNA
aaacagagagttccaggcag

SEQ ID NO: 16705 - RNA, 20 nt, synthetic construct
  source 1..20: mol_type = other RNA
aaacagtactttccaaaatg

SEQ ID NO: 16706 - RNA, 20 nt, synthetic construct
  source 1..20: mol_type = other RNA
aaacattaggcaatatattc

SEQ ID NO: 16707 - RNA, 20 nt, synthetic construct
  source 1..20: mol_type = other RNA
aaacccagcctgtctgatac

SEQ ID NO: 16708 - RNA, 20 nt, synthetic construct
  source 1..20: mol_type = other RNA
aaacctaaatgcatacaaga

SEQ ID NO: 16709 - RNA, 20 nt, synthetic construct
  source 1..20: mol_type = other RNA
aaacgcaaatcccactgtca

SEQ ID NO: 16710 - RNA, 20 nt, synthetic construct
  source 1..20: mol_type = other RNA
aaactagccaggttgggaat

SEQ ID NO: 16711 - RNA, 20 nt, synthetic construct
  source 1..20: mol_type = other RNA
aaagaaacaaaacctaaatg

SEQ ID NO: 16712 - RNA, 20 nt, synthetic construct
  source 1..20: mol_type = other RNA
aaagagctctcttagctttt

SEQ ID NO: 16713 - RNA, 20 nt, synthetic construct
  source 1..20: mol_type = other RNA
aaagattacagtgatgctct

SEQ ID NO: 16714 - RNA, 20 nt, synthetic construct
  source 1..20: mol_type = other RNA
aaagccagtaactggttgag

SEQ ID NO: 16715 - RNA, 20 nt, synthetic construct
  source 1..20: mol_type = other RNA
aaagctaagagagctctttg

SEQ ID NO: 16716 - RNA, 20 nt, synthetic construct
  source 1..20: mol_type = other RNA
aaaggcagctactcctcctt

SEQ ID NO: 16717 - RNA, 20 nt, synthetic construct
  source 1..20: mol_type = other RNA
aaaggctactagccccatca

SEQ ID NO: 16718 - RNA, 20 nt, synthetic construct
  source 1..20: mol_type = other RNA
aaagtactgtttctgaaaca

SEQ ID NO: 16719 - RNA, 20 nt, synthetic construct
  source 1..20: mol_type = other RNA
aaagtatgttctgtcccatt

SEQ ID NO: 16720 - RNA, 20 nt, synthetic construct
  source 1..20: mol_type = other RNA
aaagtcagagaggggtctgg

SEQ ID NO: 16721 - RNA, 20 nt, synthetic construct
  source 1..20: mol_type = other RNA
aaagtcataaagccagtaac

SEQ ID NO: 16722 - RNA, 20 nt, synthetic construct
  source 1..20: mol_type = other RNA
aaataactctccaaaagtca

SEQ ID NO: 16723 - RNA, 20 nt, synthetic construct
  source 1..20: mol_type = other RNA
aaatacaacagggataggtg

SEQ ID NO: 16724 - RNA, 20 nt, synthetic construct
  source 1..20: mol_type = other RNA
aaatacacttatattcaggg

SEQ ID NO: 16725 - RNA, 20 nt, synthetic construct
  source 1..20: mol_type = other RNA
aaataccttaaatggttgag

SEQ ID NO: 16726 - RNA, 20 nt, synthetic construct
  source 1..20: mol_type = other RNA
aaatatacagattgacacta

SEQ ID NO: 16727 - RNA, 20 nt, synthetic construct
  source 1..20: mol_type = other RNA
aaatcaggtcttcattagat

SEQ ID NO: 16728 - RNA, 20 nt, synthetic construct
  source 1..20: mol_type = other RNA
aaatcccactgtcacatgca

SEQ ID NO: 16729 - RNA, 20 nt, synthetic construct
  source 1..20: mol_type = other RNA
aaatcttgccgccttccctc

SEQ ID NO: 16730 - RNA, 20 nt, synthetic construct
  source 1..20: mol_type = other RNA
aaatgaagagaagtgttagt

SEQ ID NO: 16731 - RNA, 20 nt, synthetic construct
  source 1..20: mol_type = other RNA
aaatgagaggcatgactaga

SEQ ID NO: 16732 - RNA, 20 nt, synthetic construct
  source 1..20: mol_type = other RNA
aaatgcatacaagagctggc

SEQ ID NO: 16733 - RNA, 20 nt, synthetic construct
  source 1..20: mol_type = other RNA
aaatgcctcagggatcagag

SEQ ID NO: 16734 - RNA, 20 nt, synthetic construct
  source 1..20: mol_type = other RNA
aaatggagtaatgcatgtga

SEQ ID NO: 16735 - RNA, 20 nt, synthetic construct
  source 1..20: mol_type = other RNA
aaatgggacagaacatactt

SEQ ID NO: 16736 - RNA, 20 nt, synthetic construct
  source 1..20: mol_type = other RNA
aaatggttgagttggacccg

SEQ ID NO: 16737 - RNA, 20 nt, synthetic construct
  source 1..20: mol_type = other RNA
aaattaatttatgcccacag

SEQ ID NO: 16738 - RNA, 20 nt, synthetic construct
  source 1..20: mol_type = other RNA
aaattaggtacaaagtcaga

SEQ ID NO: 16739 - RNA, 20 nt, synthetic construct
  source 1..20: mol_type = other RNA
aaattcaaacccagcctgtc

SEQ ID NO: 16740 - RNA, 20 nt, synthetic construct
  source 1..20: mol_type = other RNA
aacaaaaacaaaacccacac

SEQ ID NO: 16741 - RNA, 20 nt, synthetic construct
  source 1..20: mol_type = other RNA
aacaaaacctaaatgcatac

SEQ ID NO: 16742 - RNA, 20 nt, synthetic construct
  source 1..20: mol_type = other RNA
aacaaagaaacaaaacctaa

SEQ ID NO: 16743 - RNA, 20 nt, synthetic construct
  source 1..20: mol_type = other RNA
aacaccctatcattaaggaa

SEQ ID NO: 16744 - RNA, 20 nt, synthetic construct
  source 1..20: mol_type = other RNA
aacacttctcttcattttca

SEQ ID NO: 16745 - RNA, 20 nt, synthetic construct
  source 1..20: mol_type = other RNA
aacagagagttccaggcagg

SEQ ID NO: 16746 - RNA, 20 nt, synthetic construct
  source 1..20: mol_type = other RNA
aacagggataggtgaggact

SEQ ID NO: 16747 - RNA, 20 nt, synthetic construct
  source 1..20: mol_type = other RNA
aacagtactttccaaaatga

SEQ ID NO: 16748 - RNA, 20 nt, synthetic construct
  source 1..20: mol_type = other RNA
aacatactttccattatgat

SEQ ID NO: 16749 - RNA, 20 nt, synthetic construct
  source 1..20: mol_type = other RNA
aacatattaaatgcctcagg

SEQ ID NO: 16750 - RNA, 20 nt, synthetic construct
  source 1..20: mol_type = other RNA
aacattaaaagctaagagag

SEQ ID NO: 16751 - RNA, 20 nt, synthetic construct
  source 1..20: mol_type = other RNA
aacattaggcaatatattcc

SEQ ID NO: 16752 - RNA, 20 nt, synthetic construct
  source 1..20: mol_type = other RNA
aaccagttactggctttatg

SEQ ID NO: 16753 - RNA, 20 nt, synthetic construct
  source 1..20: mol_type = other RNA
aaccatttaaggtatttgcc

SEQ ID NO: 16754 - RNA, 20 nt, synthetic construct
  source 1..20: mol_type = other RNA
aacccagcctgtctgatact

SEQ ID NO: 16755 - RNA, 20 nt, synthetic construct
  source 1..20: mol_type = other RNA
aacctaaatgcatacaagag

SEQ ID NO: 16756 - RNA, 20 nt, synthetic construct
  source 1..20: mol_type = other RNA
aacctggctagtttacagca

SEQ ID NO: 16757 - RNA, 20 nt, synthetic construct
  source 1..20: mol_type = other RNA
aacgcaaatcccactgtcac

SEQ ID NO: 16758 - RNA, 20 nt, synthetic construct
  source 1..20: mol_type = other RNA
aactagccaggttgggaata

SEQ ID NO: 16759 - RNA, 20 nt, synthetic construct
  source 1..20: mol_type = other RNA
aactcaaccatttaaggtat

SEQ ID NO: 16760 - RNA, 20 nt, synthetic construct
  source 1..20: mol_type = other RNA
aactctccaaaagtcataaa

SEQ ID NO: 16761 - RNA, 20 nt, synthetic construct
  source 1..20: mol_type = other RNA
aactctctgtttgagggaag

SEQ ID NO: 16762 - RNA, 20 nt, synthetic construct
  source 1..20: mol_type = other RNA
aactggttgagcccaaattc

SEQ ID NO: 16763 - RNA, 20 nt, synthetic construct
  source 1..20: mol_type = other RNA
aagaaacaaaacctaaatgc

SEQ ID NO: 16764 - RNA, 20 nt, synthetic construct
  source 1..20: mol_type = other RNA
aagaacatattaaatgcctc

SEQ ID NO: 16765 - RNA, 20 nt, synthetic construct
  source 1..20: mol_type = other RNA
aagaagaggacaagtatcag

SEQ ID NO: 16766 - RNA, 20 nt, synthetic construct
  source 1..20: mol_type = other RNA
aagagaagtgttagtgctac

SEQ ID NO: 16767 - RNA, 20 nt, synthetic construct
  source 1..20: mol_type = other RNA
aagagagctctttgcatctg

SEQ ID NO: 16768 - RNA, 20 nt, synthetic construct
  source 1..20: mol_type = other RNA
aagagctctcttagctttta

SEQ ID NO: 16769 - RNA, 20 nt, synthetic construct
  source 1..20: mol_type = other RNA
aagagctggcaaatacctta

SEQ ID NO: 16770 - RNA, 20 nt, synthetic construct
  source 1..20: mol_type = other RNA
aagaggacaagtatcagaca

SEQ ID NO: 16771 - RNA, 20 nt, synthetic construct
  source 1..20: mol_type = other RNA
aagaggtggattggggaatc

SEQ ID NO: 16772 - RNA, 20 nt, synthetic construct
  source 1..20: mol_type = other RNA
aagattacagtgatgctctc

SEQ ID NO: 16773 - RNA, 20 nt, synthetic construct
  source 1..20: mol_type = other RNA
aagattttgtgagagcatca

SEQ ID NO: 16774 - RNA, 20 nt, synthetic construct
  source 1..20: mol_type = other RNA
aagccagtaactggttgagc

SEQ ID NO: 16775 - RNA, 20 nt, synthetic construct
  source 1..20: mol_type = other RNA
aagctaagagagctctttgc

SEQ ID NO: 16776 - RNA, 20 nt, synthetic construct
  source 1..20: mol_type = other RNA
aagctcagatgcaaagagct

SEQ ID NO: 16777 - RNA, 20 nt, synthetic construct
  source 1..20: mol_type = other RNA
aagcttaaataactctccaa

SEQ ID NO: 16778 - RNA, 20 nt, synthetic construct
  source 1..20: mol_type = other RNA
aagcttccaaaacttaactg

SEQ ID NO: 16779 - RNA, 20 nt, synthetic construct
  source 1..20: mol_type = other RNA
aaggaaaggctactagcccc

SEQ ID NO: 16780 - RNA, 20 nt, synthetic construct
  source 1..20: mol_type = other RNA
aaggaggagtaccaggccac

SEQ ID NO: 16781 - RNA, 20 nt, synthetic construct
  source 1..20: mol_type = other RNA
aaggaggagtagctgccttt

SEQ ID NO: 16782 - RNA, 20 nt, synthetic construct
  source 1..20: mol_type = other RNA
aaggcagctactcctccttg

SEQ ID NO: 16783 - RNA, 20 nt, synthetic construct
  source 1..20: mol_type = other RNA
aaggcggcaagattttgtga

SEQ ID NO: 16784 - RNA, 20 nt, synthetic construct
  source 1..20: mol_type = other RNA
aaggctactagccccatcaa

SEQ ID NO: 16785 - RNA, 20 nt, synthetic construct
  source 1..20: mol_type = other RNA
aaggtatttgccagctcttg

SEQ ID NO: 16786 - RNA, 20 nt, synthetic construct
  source 1..20: mol_type = other RNA
aaggtggcctggtactcctc

SEQ ID NO: 16787 - RNA, 20 nt, synthetic construct
  source 1..20: mol_type = other RNA
aagtactgtttctgaaacat

SEQ ID NO: 16788 - RNA, 20 nt, synthetic construct
  source 1..20: mol_type = other RNA
aagtatcagacaggctgggt

SEQ ID NO: 16789 - RNA, 20 nt, synthetic construct
  source 1..20: mol_type = other RNA
aagtatgttctgtcccattt

SEQ ID NO: 16790 - RNA, 20 nt, synthetic construct
  source 1..20: mol_type = other RNA
aagtcataaagccagtaact

SEQ ID NO: 16791 - RNA, 20 nt, synthetic construct
  source 1..20: mol_type = other RNA
aagtgggaagaaaatattat

SEQ ID NO: 16792 - RNA, 20 nt, synthetic construct
  source 1..20: mol_type = other RNA
aagtgttagtgctactaaat

SEQ ID NO: 16793 - RNA, 20 nt, synthetic construct
  source 1..20: mol_type = other RNA
aagttttggaagcttaaata

SEQ ID NO: 16794 - RNA, 20 nt, synthetic construct
  source 1..20: mol_type = other RNA
aataactctccaaaagtcat

SEQ ID NO: 16795 - RNA, 20 nt, synthetic construct
  source 1..20: mol_type = other RNA
aatacaacagggataggtga

SEQ ID NO: 16796 - RNA, 20 nt, synthetic construct
  source 1..20: mol_type = other RNA
aatacacttatattcagggt

SEQ ID NO: 16797 - RNA, 20 nt, synthetic construct
  source 1..20: mol_type = other RNA
aataccttaaatggttgagt

SEQ ID NO: 16798 - RNA, 20 nt, synthetic construct
  source 1..20: mol_type = other RNA
aatatacagattgacactaa

SEQ ID NO: 16799 - RNA, 20 nt, synthetic construct
  source 1..20: mol_type = other RNA
aatatattcccaacctggct

SEQ ID NO: 16800 - RNA, 20 nt, synthetic construct
  source 1..20: mol_type = other RNA
aatatattgcctaatgtttc

SEQ ID NO: 16801 - RNA, 20 nt, synthetic construct
  source 1..20: mol_type = other RNA
aatattttcttcccacttcc

SEQ ID NO: 16802 - RNA, 20 nt, synthetic construct
  source 1..20: mol_type = other RNA
aatcacctgtggatgctaat

SEQ ID NO: 16803 - RNA, 20 nt, synthetic construct
  source 1..20: mol_type = other RNA
aatcaggtcttcattagatt

SEQ ID NO: 16804 - RNA, 20 nt, synthetic construct
  source 1..20: mol_type = other RNA
aatccacctcttgatggggc

SEQ ID NO: 16805 - RNA, 20 nt, synthetic construct
  source 1..20: mol_type = other RNA
aatcccactgtcacatgcat

SEQ ID NO: 16806 - RNA, 20 nt, synthetic construct
  source 1..20: mol_type = other RNA
aatctaatgaagacctgatt

SEQ ID NO: 16807 - RNA, 20 nt, synthetic construct
  source 1..20: mol_type = other RNA
aatctgtatatttagtagca

SEQ ID NO: 16808 - RNA, 20 nt, synthetic construct
  source 1..20: mol_type = other RNA
aatctgtgctctgatccctg

SEQ ID NO: 16809 - RNA, 20 nt, synthetic construct
  source 1..20: mol_type = other RNA
aatcttgccgccttccctca

SEQ ID NO: 16810 - RNA, 20 nt, synthetic construct
  source 1..20: mol_type = other RNA
aatcttttctaagaagagga

SEQ ID NO: 16811 - RNA, 20 nt, synthetic construct
  source 1..20: mol_type = other RNA
aatgaagagaagtgttagtg

SEQ ID NO: 16812 - RNA, 20 nt, synthetic construct
  source 1..20: mol_type = other RNA
aatgagaggcatgactagac

SEQ ID NO: 16813 - RNA, 20 nt, synthetic construct
  source 1..20: mol_type = other RNA
aatgatagggtgtttctaga

SEQ ID NO: 16814 - RNA, 20 nt, synthetic construct
  source 1..20: mol_type = other RNA
aatgcatacaagagctggca

SEQ ID NO: 16815 - RNA, 20 nt, synthetic construct
  source 1..20: mol_type = other RNA
aatgcatgtgacagtgggat

SEQ ID NO: 16816 - RNA, 20 nt, synthetic construct
  source 1..20: mol_type = other RNA
aatgcctcagggatcagagc

SEQ ID NO: 16817 - RNA, 20 nt, synthetic construct
  source 1..20: mol_type = other RNA
aatggaaagtatgttctgtc

SEQ ID NO: 16818 - RNA, 20 nt, synthetic construct
  source 1..20: mol_type = other RNA
aatggagtaatgcatgtgac

SEQ ID NO: 16819 - RNA, 20 nt, synthetic construct
  source 1..20: mol_type = other RNA
aatgggacagaacatacttt

SEQ ID NO: 16820 - RNA, 20 nt, synthetic construct
  source 1..20: mol_type = other RNA
aatggttgagttggacccga

SEQ ID NO: 16821 - RNA, 20 nt, synthetic construct
  source 1..20: mol_type = other RNA
aatgtttcagaaacagtact

SEQ ID NO: 16822 - RNA, 20 nt, synthetic construct
  source 1..20: mol_type = other RNA
aattaaaacgcaaatcccac

SEQ ID NO: 16823 - RNA, 20 nt, synthetic construct
  source 1..20: mol_type = other RNA
aattaatttatgcccacagt

SEQ ID NO: 16824 - RNA, 20 nt, synthetic construct
  source 1..20: mol_type = other RNA
aattagcatccacaggtgat

SEQ ID NO: 16825 - RNA, 20 nt, synthetic construct
  source 1..20: mol_type = other RNA
aattaggtacaaagtcagag

SEQ ID NO: 16826 - RNA, 20 nt, synthetic construct
  source 1..20: mol_type = other RNA
aattcaaacccagcctgtct

SEQ ID NO: 16827 - RNA, 20 nt, synthetic construct
  source 1..20: mol_type = other RNA
aatttatgcccacagtaaaa

SEQ ID NO: 16828 - RNA, 20 nt, synthetic construct
  source 1..20: mol_type = other RNA
aatttcatgagctaaaaaac

SEQ ID NO: 16829 - RNA, 20 nt, synthetic construct
  source 1..20: mol_type = other RNA
aatttgggctcaaccagtta

SEQ ID NO: 16830 - RNA, 20 nt, synthetic construct
  source 1..20: mol_type = other RNA
acaaaaacaaaacccacaca

SEQ ID NO: 16831 - RNA, 20 nt, synthetic construct
  source 1..20: mol_type = other RNA
acaaaacctaaatgcataca

SEQ ID NO: 16832 - RNA, 20 nt, synthetic construct
  source 1..20: mol_type = other RNA
acaaaatcttgccgccttcc

SEQ ID NO: 16833 - RNA, 20 nt, synthetic construct
  source 1..20: mol_type = other RNA
acaaagaaacaaaacctaaa

SEQ ID NO: 16834 - RNA, 20 nt, synthetic construct
  source 1..20: mol_type = other RNA
acaaagtcagagaggggtct

SEQ ID NO: 16835 - RNA, 20 nt, synthetic construct
  source 1..20: mol_type = other RNA
acaacagggataggtgagga

SEQ ID NO: 16836 - RNA, 20 nt, synthetic construct
  source 1..20: mol_type = other RNA
acaagagctggcaaatacct

SEQ ID NO: 16837 - RNA, 20 nt, synthetic construct
  source 1..20: mol_type = other RNA
acaaggaggagtagctgcct

SEQ ID NO: 16838 - RNA, 20 nt, synthetic construct
  source 1..20: mol_type = other RNA
acaagtatcagacaggctgg

SEQ ID NO: 16839 - RNA, 20 nt, synthetic construct
  source 1..20: mol_type = other RNA
acacatatatttagtgtcaa

SEQ ID NO: 16840 - RNA, 20 nt, synthetic construct
  source 1..20: mol_type = other RNA
acaccctatcattaaggaaa

SEQ ID NO: 16841 - RNA, 20 nt, synthetic construct
  source 1..20: mol_type = other RNA
acacttatattcagggtaca

SEQ ID NO: 16842 - RNA, 20 nt, synthetic construct
  source 1..20: mol_type = other RNA
acacttctcttcattttcaa

SEQ ID NO: 16843 - RNA, 20 nt, synthetic construct
  source 1..20: mol_type = other RNA
acagaacatactttccatta

SEQ ID NO: 16844 - RNA, 20 nt, synthetic construct
  source 1..20: mol_type = other RNA
acagagagttccaggcagga

SEQ ID NO: 16845 - RNA, 20 nt, synthetic construct
  source 1..20: mol_type = other RNA
acagattcatcctgcctgga

SEQ ID NO: 16846 - RNA, 20 nt, synthetic construct
  source 1..20: mol_type = other RNA
acagattgacactaaatata

SEQ ID NO: 16847 - RNA, 20 nt, synthetic construct
  source 1..20: mol_type = other RNA
acagcaatcacctgtggatg

SEQ ID NO: 16848 - RNA, 20 nt, synthetic construct
  source 1..20: mol_type = other RNA
acagcctcccagacaaggag

SEQ ID NO: 16849 - RNA, 20 nt, synthetic construct
  source 1..20: mol_type = other RNA
acaggctgggtttgaatttg

SEQ ID NO: 16850 - RNA, 20 nt, synthetic construct
  source 1..20: mol_type = other RNA
acagggataggtgaggacta

SEQ ID NO: 16851 - RNA, 20 nt, synthetic construct
  source 1..20: mol_type = other RNA
acaggtgattgctgtaaact

SEQ ID NO: 16852 - RNA, 20 nt, synthetic construct
  source 1..20: mol_type = other RNA
acagtactttccaaaatgag

SEQ ID NO: 16853 - RNA, 20 nt, synthetic construct
  source 1..20: mol_type = other RNA
acagtgatgctctcacaaaa

SEQ ID NO: 16854 - RNA, 20 nt, synthetic construct
  source 1..20: mol_type = other RNA
acagtgggatttgcgtttta

SEQ ID NO: 16855 - RNA, 20 nt, synthetic construct
  source 1..20: mol_type = other RNA
acatactttccattatgatc

SEQ ID NO: 16856 - RNA, 20 nt, synthetic construct
  source 1..20: mol_type = other RNA
acatatatttagtgtcaatc

SEQ ID NO: 16857 - RNA, 20 nt, synthetic construct
  source 1..20: mol_type = other RNA
acatattaaatgcctcaggg

SEQ ID NO: 16858 - RNA, 20 nt, synthetic construct
  source 1..20: mol_type = other RNA
acatgatcactaaaaggcag

SEQ ID NO: 16859 - RNA, 20 nt, synthetic construct
  source 1..20: mol_type = other RNA
acatgcattactccatttga

SEQ ID NO: 16860 - RNA, 20 nt, synthetic construct
  source 1..20: mol_type = other RNA
acattaaaagctaagagagc

SEQ ID NO: 16861 - RNA, 20 nt, synthetic construct
  source 1..20: mol_type = other RNA
acattaggcaatatattccc

SEQ ID NO: 16862 - RNA, 20 nt, synthetic construct
  source 1..20: mol_type = other RNA
accagatatatctctctaga

SEQ ID NO: 16863 - RNA, 20 nt, synthetic construct
  source 1..20: mol_type = other RNA
accaggccaccttgaccaga

SEQ ID NO: 16864 - RNA, 20 nt, synthetic construct
  source 1..20: mol_type = other RNA
accagttactggctttatga

SEQ ID NO: 16865 - RNA, 20 nt, synthetic construct
  source 1..20: mol_type = other RNA
accatccatggggaagtggg

SEQ ID NO: 16866 - RNA, 20 nt, synthetic construct
  source 1..20: mol_type = other RNA
accatttaaggtatttgcca

SEQ ID NO: 16867 - RNA, 20 nt, synthetic construct
  source 1..20: mol_type = other RNA
acccagcctgtctgatactt

SEQ ID NO: 16868 - RNA, 20 nt, synthetic construct
  source 1..20: mol_type = other RNA
acccctctctgactttgtac

SEQ ID NO: 16869 - RNA, 20 nt, synthetic construct
  source 1..20: mol_type = other RNA
acccgataaaatacaacagg

SEQ ID NO: 16870 - RNA, 20 nt, synthetic construct
  source 1..20: mol_type = other RNA
accctatcattaaggaaagg

SEQ ID NO: 16871 - RNA, 20 nt, synthetic construct
  source 1..20: mol_type = other RNA
accctgaatataagtgtatt

SEQ ID NO: 16872 - RNA, 20 nt, synthetic construct
  source 1..20: mol_type = other RNA
acctaaatgcatacaagagc

SEQ ID NO: 16873 - RNA, 20 nt, synthetic construct
  source 1..20: mol_type = other RNA
acctaatttcatgagctaaa

SEQ ID NO: 16874 - RNA, 20 nt, synthetic construct
  source 1..20: mol_type = other RNA
acctatccctgttgtatttt

SEQ ID NO: 16875 - RNA, 20 nt, synthetic construct
  source 1..20: mol_type = other RNA
acctcttgatggggctagta

SEQ ID NO: 16876 - RNA, 20 nt, synthetic construct
  source 1..20: mol_type = other RNA
acctggctagtttacagcaa

SEQ ID NO: 16877 - RNA, 20 nt, synthetic construct
  source 1..20: mol_type = other RNA
acctgtggatgctaattaaa

SEQ ID NO: 16878 - RNA, 20 nt, synthetic construct
  source 1..20: mol_type = other RNA
acctgtgtgtgggttttgtt

SEQ ID NO: 16879 - RNA, 20 nt, synthetic construct
  source 1..20: mol_type = other RNA
accttaaatggttgagttgg

SEQ ID NO: 16880 - RNA, 20 nt, synthetic construct
  source 1..20: mol_type = other RNA
accttgaccagatatatctc

SEQ ID NO: 16881 - RNA, 20 nt, synthetic construct
  source 1..20: mol_type = other RNA
acgcaaatcccactgtcaca

SEQ ID NO: 16882 - RNA, 20 nt, synthetic construct
  source 1..20: mol_type = other RNA
actaaaaggcagctactcct

SEQ ID NO: 16883 - RNA, 20 nt, synthetic construct
  source 1..20: mol_type = other RNA
actaaatatacagattgaca

SEQ ID NO: 16884 - RNA, 20 nt, synthetic construct
  source 1..20: mol_type = other RNA
actaacacttctcttcattt

SEQ ID NO: 16885 - RNA, 20 nt, synthetic construct
  source 1..20: mol_type = other RNA
actagaccatccatggggaa

SEQ ID NO: 16886 - RNA, 20 nt, synthetic construct
  source 1..20: mol_type = other RNA
actagccaggttgggaatat

SEQ ID NO: 16887 - RNA, 20 nt, synthetic construct
  source 1..20: mol_type = other RNA
actagccccatcaagaggtg

SEQ ID NO: 16888 - RNA, 20 nt, synthetic construct
  source 1..20: mol_type = other RNA
actatggcaaatgggacaga

SEQ ID NO: 16889 - RNA, 20 nt, synthetic construct
  source 1..20: mol_type = other RNA
actcaaccatttaaggtatt

SEQ ID NO: 16890 - RNA, 20 nt, synthetic construct
  source 1..20: mol_type = other RNA
actccatttgatcataatgg

SEQ ID NO: 16891 - RNA, 20 nt, synthetic construct
  source 1..20: mol_type = other RNA
actcctccttctccccacag

SEQ ID NO: 16892 - RNA, 20 nt, synthetic construct
  source 1..20: mol_type = other RNA
actcctccttgtctgggagg

SEQ ID NO: 16893 - RNA, 20 nt, synthetic construct
  source 1..20: mol_type = other RNA
actctccaaaagtcataaag

SEQ ID NO: 16894 - RNA, 20 nt, synthetic construct
  source 1..20: mol_type = other RNA
actctctgtttgagggaagg

SEQ ID NO: 16895 - RNA, 20 nt, synthetic construct
  source 1..20: mol_type = other RNA
actggctttatgacttttgg

SEQ ID NO: 16896 - RNA, 20 nt, synthetic construct
  source 1..20: mol_type = other RNA
actggttgagcccaaattca

SEQ ID NO: 16897 - RNA, 20 nt, synthetic construct
  source 1..20: mol_type = other RNA
actgtaatcttttctaagaa

SEQ ID NO: 16898 - RNA, 20 nt, synthetic construct
  source 1..20: mol_type = other RNA
actgtcacatgcattactcc

SEQ ID NO: 16899 - RNA, 20 nt, synthetic construct
  source 1..20: mol_type = other RNA
actgtgggcataaattaatt

SEQ ID NO: 16900 - RNA, 20 nt, synthetic construct
  source 1..20: mol_type = other RNA
actgtttctgaaacattagg

SEQ ID NO: 16901 - RNA, 20 nt, synthetic construct
  source 1..20: mol_type = other RNA
acttatattcagggtacatg

SEQ ID NO: 16902 - RNA, 20 nt, synthetic construct
  source 1..20: mol_type = other RNA
acttccccatggatggtcta

SEQ ID NO: 16903 - RNA, 20 nt, synthetic construct
  source 1..20: mol_type = other RNA
acttctcttcattttcaatg

SEQ ID NO: 16904 - RNA, 20 nt, synthetic construct
  source 1..20: mol_type = other RNA
acttgtcctcttcttagaaa

SEQ ID NO: 16905 - RNA, 20 nt, synthetic construct
  source 1..20: mol_type = other RNA
actttccaaaatgagaggca

SEQ ID NO: 16906 - RNA, 20 nt, synthetic construct
  source 1..20: mol_type = other RNA
actttccattatgatcaaat

SEQ ID NO: 16907 - RNA, 20 nt, synthetic construct
  source 1..20: mol_type = other RNA
actttgtacctaatttcatg

SEQ ID NO: 16908 - RNA, 20 nt, synthetic construct
  source 1..20: mol_type = other RNA
acttttggagagttatttaa

SEQ ID NO: 16909 - RNA, 20 nt, synthetic construct
  source 1..20: mol_type = other RNA
agaaaagattacagtgatgc

SEQ ID NO: 16910 - RNA, 20 nt, synthetic construct
  source 1..20: mol_type = other RNA
agaaacaaaacctaaatgca

SEQ ID NO: 16911 - RNA, 20 nt, synthetic construct
  source 1..20: mol_type = other RNA
agaaacaccctatcattaag

SEQ ID NO: 16912 - RNA, 20 nt, synthetic construct
  source 1..20: mol_type = other RNA
agaaacagtactttccaaaa

SEQ ID NO: 16913 - RNA, 20 nt, synthetic construct
  source 1..20: mol_type = other RNA
agaacatactttccattatg

SEQ ID NO: 16914 - RNA, 20 nt, synthetic construct
  source 1..20: mol_type = other RNA
agaacatattaaatgcctca

SEQ ID NO: 16915 - RNA, 20 nt, synthetic construct
  source 1..20: mol_type = other RNA
agaagaggacaagtatcaga

SEQ ID NO: 16916 - RNA, 20 nt, synthetic construct
  source 1..20: mol_type = other RNA
agaagctcagatgcaaagag

SEQ ID NO: 16917 - RNA, 20 nt, synthetic construct
  source 1..20: mol_type = other RNA
agaaggaggagtaccaggcc

SEQ ID NO: 16918 - RNA, 20 nt, synthetic construct
  source 1..20: mol_type = other RNA
agaagtgttagtgctactaa

SEQ ID NO: 16919 - RNA, 20 nt, synthetic construct
  source 1..20: mol_type = other RNA
agacaaggaggagtagctgc

SEQ ID NO: 16920 - RNA, 20 nt, synthetic construct
  source 1..20: mol_type = other RNA
agacaggctgggtttgaatt

SEQ ID NO: 16921 - RNA, 20 nt, synthetic construct
  source 1..20: mol_type = other RNA
agaccatccatggggaagtg

SEQ ID NO: 16922 - RNA, 20 nt, synthetic construct
  source 1..20: mol_type = other RNA
agacccctctctgactttgt

SEQ ID NO: 16923 - RNA, 20 nt, synthetic construct
  source 1..20: mol_type = other RNA
agagaagtgttagtgctact

SEQ ID NO: 16924 - RNA, 20 nt, synthetic construct
  source 1..20: mol_type = other RNA
agagagatatatctggtcaa

SEQ ID NO: 16925 - RNA, 20 nt, synthetic construct
  source 1..20: mol_type = other RNA
agagagctctttgcatctga

SEQ ID NO: 16926 - RNA, 20 nt, synthetic construct
  source 1..20: mol_type = other RNA
agagagttccaggcaggatg

SEQ ID NO: 16927 - RNA, 20 nt, synthetic construct
  source 1..20: mol_type = other RNA
agagatatatctggtcaagg

SEQ ID NO: 16928 - RNA, 20 nt, synthetic construct
  source 1..20: mol_type = other RNA
agagcacagattcatcctgc

SEQ ID NO: 16929 - RNA, 20 nt, synthetic construct
  source 1..20: mol_type = other RNA
agagcatcactgtaatcttt

SEQ ID NO: 16930 - RNA, 20 nt, synthetic construct
  source 1..20: mol_type = other RNA
agagctctcttagcttttaa

SEQ ID NO: 16931 - RNA, 20 nt, synthetic construct
  source 1..20: mol_type = other RNA
agagctctttgcatctgagc

SEQ ID NO: 16932 - RNA, 20 nt, synthetic construct
  source 1..20: mol_type = other RNA
agagctggcaaataccttaa

SEQ ID NO: 16933 - RNA, 20 nt, synthetic construct
  source 1..20: mol_type = other RNA
agaggacaagtatcagacag

SEQ ID NO: 16934 - RNA, 20 nt, synthetic construct
  source 1..20: mol_type = other RNA
agaggcatgactagaccatc

SEQ ID NO: 16935 - RNA, 20 nt, synthetic construct
  source 1..20: mol_type = other RNA
agaggtggattggggaatct

SEQ ID NO: 16936 - RNA, 20 nt, synthetic construct
  source 1..20: mol_type = other RNA
agagttatttaagcttccaa

SEQ ID NO: 16937 - RNA, 20 nt, synthetic construct
  source 1..20: mol_type = other RNA
agagttccaggcaggatgaa

SEQ ID NO: 16938 - RNA, 20 nt, synthetic construct
  source 1..20: mol_type = other RNA
agatatatctctctagaaac

SEQ ID NO: 16939 - RNA, 20 nt, synthetic construct
  source 1..20: mol_type = other RNA
agatatatctggtcaaggtg

SEQ ID NO: 16940 - RNA, 20 nt, synthetic construct
  source 1..20: mol_type = other RNA
agatgcaaagagctctctta

SEQ ID NO: 16941 - RNA, 20 nt, synthetic construct
  source 1..20: mol_type = other RNA
agattacagtgatgctctca

SEQ ID NO: 16942 - RNA, 20 nt, synthetic construct
  source 1..20: mol_type = other RNA
agattcatcctgcctggaac

SEQ ID NO: 16943 - RNA, 20 nt, synthetic construct
  source 1..20: mol_type = other RNA
agattccccaatccacctct

SEQ ID NO: 16944 - RNA, 20 nt, synthetic construct
  source 1..20: mol_type = other RNA
agattgacactaaatatatg

SEQ ID NO: 16945 - RNA, 20 nt, synthetic construct
  source 1..20: mol_type = other RNA
agattttgtgagagcatcac

SEQ ID NO: 16946 - RNA, 20 nt, synthetic construct
  source 1..20: mol_type = other RNA
agcaatcacctgtggatgct

SEQ ID NO: 16947 - RNA, 20 nt, synthetic construct
  source 1..20: mol_type = other RNA
agcacagattcatcctgcct

SEQ ID NO: 16948 - RNA, 20 nt, synthetic construct
  source 1..20: mol_type = other RNA
agcactaacacttctcttca

SEQ ID NO: 16949 - RNA, 20 nt, synthetic construct
  source 1..20: mol_type = other RNA
agcatcactgtaatcttttc

SEQ ID NO: 16950 - RNA, 20 nt, synthetic construct
  source 1..20: mol_type = other RNA
agcatccacaggtgattgct

SEQ ID NO: 16951 - RNA, 20 nt, synthetic construct
  source 1..20: mol_type = other RNA
agccaggttgggaatatatt

SEQ ID NO: 16952 - RNA, 20 nt, synthetic construct
  source 1..20: mol_type = other RNA
agccagtaactggttgagcc

SEQ ID NO: 16953 - RNA, 20 nt, synthetic construct
  source 1..20: mol_type = other RNA
agcccaaattcaaacccagc

SEQ ID NO: 16954 - RNA, 20 nt, synthetic construct
  source 1..20: mol_type = other RNA
agccccatcaagaggtggat

SEQ ID NO: 16955 - RNA, 20 nt, synthetic construct
  source 1..20: mol_type = other RNA
agcctcccagacaaggagga

SEQ ID NO: 16956 - RNA, 20 nt, synthetic construct
  source 1..20: mol_type = other RNA
agcctgtctgatacttgtcc

SEQ ID NO: 16957 - RNA, 20 nt, synthetic construct
  source 1..20: mol_type = other RNA
agcctttccttaatgatagg

SEQ ID NO: 16958 - RNA, 20 nt, synthetic construct
  source 1..20: mol_type = other RNA
agctaaaaaacaaagaaaca

SEQ ID NO: 16959 - RNA, 20 nt, synthetic construct
  source 1..20: mol_type = other RNA
agctaagagagctctttgca

SEQ ID NO: 16960 - RNA, 20 nt, synthetic construct
  source 1..20: mol_type = other RNA
agctactcctccttgtctgg

SEQ ID NO: 16961 - RNA, 20 nt, synthetic construct
  source 1..20: mol_type = other RNA
agctcagatgcaaagagctc

SEQ ID NO: 16962 - RNA, 20 nt, synthetic construct
  source 1..20: mol_type = other RNA
agctcatgaaattaggtaca

SEQ ID NO: 16963 - RNA, 20 nt, synthetic construct
  source 1..20: mol_type = other RNA
agctctcttagcttttaatg

SEQ ID NO: 16964 - RNA, 20 nt, synthetic construct
  source 1..20: mol_type = other RNA
agctcttgtatgcatttagg

SEQ ID NO: 16965 - RNA, 20 nt, synthetic construct
  source 1..20: mol_type = other RNA
agctctttgcatctgagctt

SEQ ID NO: 16966 - RNA, 20 nt, synthetic construct
  source 1..20: mol_type = other RNA
agctgccttttagtgatcat

SEQ ID NO: 16967 - RNA, 20 nt, synthetic construct
  source 1..20: mol_type = other RNA
agctggcaaataccttaaat

SEQ ID NO: 16968 - RNA, 20 nt, synthetic construct
  source 1..20: mol_type = other RNA
agcttaaataactctccaaa

SEQ ID NO: 16969 - RNA, 20 nt, synthetic construct
  source 1..20: mol_type = other RNA
agcttccaaaacttaactga

SEQ ID NO: 16970 - RNA, 20 nt, synthetic construct
  source 1..20: mol_type = other RNA
agcttctaataataagaaca

SEQ ID NO: 16971 - RNA, 20 nt, synthetic construct
  source 1..20: mol_type = other RNA
aggaaaggctactagcccca

SEQ ID NO: 16972 - RNA, 20 nt, synthetic construct
  source 1..20: mol_type = other RNA
aggacaagtatcagacaggc

SEQ ID NO: 16973 - RNA, 20 nt, synthetic construct
  source 1..20: mol_type = other RNA
aggactatggcaaatgggac

SEQ ID NO: 16974 - RNA, 20 nt, synthetic construct
  source 1..20: mol_type = other RNA
aggaggagtaccaggccacc

SEQ ID NO: 16975 - RNA, 20 nt, synthetic construct
  source 1..20: mol_type = other RNA
aggaggagtagctgcctttt

SEQ ID NO: 16976 - RNA, 20 nt, synthetic construct
  source 1..20: mol_type = other RNA
aggagtaccaggccaccttg

SEQ ID NO: 16977 - RNA, 20 nt, synthetic construct
  source 1..20: mol_type = other RNA
aggagtagctgccttttagt

SEQ ID NO: 16978 - RNA, 20 nt, synthetic construct
  source 1..20: mol_type = other RNA
aggatgaatctgtgctctga

SEQ ID NO: 16979 - RNA, 20 nt, synthetic construct
  source 1..20: mol_type = other RNA
aggcaatatattcccaacct

SEQ ID NO: 16980 - RNA, 20 nt, synthetic construct
  source 1..20: mol_type = other RNA
aggcagctactcctccttgt

SEQ ID NO: 16981 - RNA, 20 nt, synthetic construct
  source 1..20: mol_type = other RNA
aggcaggatgaatctgtgct

SEQ ID NO: 16982 - RNA, 20 nt, synthetic construct
  source 1..20: mol_type = other RNA
aggcatgactagaccatcca

SEQ ID NO: 16983 - RNA, 20 nt, synthetic construct
  source 1..20: mol_type = other RNA
aggcatttaatatgttctta

SEQ ID NO: 16984 - RNA, 20 nt, synthetic construct
  source 1..20: mol_type = other RNA
aggccaccttgaccagatat

SEQ ID NO: 16985 - RNA, 20 nt, synthetic construct
  source 1..20: mol_type = other RNA
aggcggcaagattttgtgag

SEQ ID NO: 16986 - RNA, 20 nt, synthetic construct
  source 1..20: mol_type = other RNA
aggctactagccccatcaag

SEQ ID NO: 16987 - RNA, 20 nt, synthetic construct
  source 1..20: mol_type = other RNA
aggctgggtttgaatttggg

SEQ ID NO: 16988 - RNA, 20 nt, synthetic construct
  source 1..20: mol_type = other RNA
aggctgtggggagaaggagg

SEQ ID NO: 16989 - RNA, 20 nt, synthetic construct
  source 1..20: mol_type = other RNA
agggaaggcggcaagatttt

SEQ ID NO: 16990 - RNA, 20 nt, synthetic construct
  source 1..20: mol_type = other RNA
agggataggtgaggactatg

SEQ ID NO: 16991 - RNA, 20 nt, synthetic construct
  source 1..20: mol_type = other RNA
agggatcagagcacagattc

SEQ ID NO: 16992 - RNA, 20 nt, synthetic construct
  source 1..20: mol_type = other RNA
agggtacatgatcactaaaa

SEQ ID NO: 16993 - RNA, 20 nt, synthetic construct
  source 1..20: mol_type = other RNA
agggtgtttctagagagata

SEQ ID NO: 16994 - RNA, 20 nt, synthetic construct
  source 1..20: mol_type = other RNA
aggtacaaagtcagagaggg

SEQ ID NO: 16995 - RNA, 20 nt, synthetic construct
  source 1..20: mol_type = other RNA
aggtatttgccagctcttgt

SEQ ID NO: 16996 - RNA, 20 nt, synthetic construct
  source 1..20: mol_type = other RNA
aggtcttcattagattcccc

SEQ ID NO: 16997 - RNA, 20 nt, synthetic construct
  source 1..20: mol_type = other RNA
aggtgaggactatggcaaat

SEQ ID NO: 16998 - RNA, 20 nt, synthetic construct
  source 1..20: mol_type = other RNA
aggtgattgctgtaaactag

SEQ ID NO: 16999 - RNA, 20 nt, synthetic construct
  source 1..20: mol_type = other RNA
aggtggattggggaatctaa

SEQ ID NO: 17000 - RNA, 20 nt, synthetic construct
  source 1..20: mol_type = other RNA
aggtggcctggtactcctcc

SEQ ID NO: 17001 - RNA, 20 nt, synthetic construct
  source 1..20: mol_type = other RNA
aggttgggaatatattgcct

SEQ ID NO: 17002 - RNA, 20 nt, synthetic construct
  source 1..20: mol_type = other RNA
aggttttgtttctttgtttt

SEQ ID NO: 17003 - RNA, 20 nt, synthetic construct
  source 1..20: mol_type = other RNA
agtaaaacaaaaacaaaacc

SEQ ID NO: 17004 - RNA, 20 nt, synthetic construct
  source 1..20: mol_type = other RNA
agtaactggttgagcccaaa

SEQ ID NO: 17005 - RNA, 20 nt, synthetic construct
  source 1..20: mol_type = other RNA
agtaatgcatgtgacagtgg

SEQ ID NO: 17006 - RNA, 20 nt, synthetic construct
  source 1..20: mol_type = other RNA
agtaccaggccaccttgacc

SEQ ID NO: 17007 - RNA, 20 nt, synthetic construct
  source 1..20: mol_type = other RNA
agtactgtttctgaaacatt

SEQ ID NO: 17008 - RNA, 20 nt, synthetic construct
  source 1..20: mol_type = other RNA
agtactttccaaaatgagag

SEQ ID NO: 17009 - RNA, 20 nt, synthetic construct
  source 1..20: mol_type = other RNA
agtagcactaacacttctct

SEQ ID NO: 17010 - RNA, 20 nt, synthetic construct
  source 1..20: mol_type = other RNA
agtagcctttccttaatgat

SEQ ID NO: 17011 - RNA, 20 nt, synthetic construct
  source 1..20: mol_type = other RNA
agtagctgccttttagtgat

SEQ ID NO: 17012 - RNA, 20 nt, synthetic construct
  source 1..20: mol_type = other RNA
agtatcagacaggctgggtt

SEQ ID NO: 17013 - RNA, 20 nt, synthetic construct
  source 1..20: mol_type = other RNA
agtatgttctgtcccatttg

SEQ ID NO: 17014 - RNA, 20 nt, synthetic construct
  source 1..20: mol_type = other RNA
agtcataaagccagtaactg

SEQ ID NO: 17015 - RNA, 20 nt, synthetic construct
  source 1..20: mol_type = other RNA
agtcatgcctctcattttgg

SEQ ID NO: 17016 - RNA, 20 nt, synthetic construct
  source 1..20: mol_type = other RNA
agtcctcacctatccctgtt

SEQ ID NO: 17017 - RNA, 20 nt, synthetic construct
  source 1..20: mol_type = other RNA
agtgatcatgtaccctgaat

SEQ ID NO: 17018 - RNA, 20 nt, synthetic construct
  source 1..20: mol_type = other RNA
agtgatgctctcacaaaatc

SEQ ID NO: 17019 - RNA, 20 nt, synthetic construct
  source 1..20: mol_type = other RNA
agtgctactaaatatacaga

SEQ ID NO: 17020 - RNA, 20 nt, synthetic construct
  source 1..20: mol_type = other RNA
agtgggaagaaaatattata

SEQ ID NO: 17021 - RNA, 20 nt, synthetic construct
  source 1..20: mol_type = other RNA
agtgggatttgcgttttaat

SEQ ID NO: 17022 - RNA, 20 nt, synthetic construct
  source 1..20: mol_type = other RNA
agtgtcaatctgtatattta

SEQ ID NO: 17023 - RNA, 20 nt, synthetic construct
  source 1..20: mol_type = other RNA
agtgttagtgctactaaata

SEQ ID NO: 17024 - RNA, 20 nt, synthetic construct
  source 1..20: mol_type = other RNA
agttaagttttggaagctta

SEQ ID NO: 17025 - RNA, 20 nt, synthetic construct
  source 1..20: mol_type = other RNA
agttactggctttatgactt

SEQ ID NO: 17026 - RNA, 20 nt, synthetic construct
  source 1..20: mol_type = other RNA
agttatttaagcttccaaaa

SEQ ID NO: 17027 - RNA, 20 nt, synthetic construct
  source 1..20: mol_type = other RNA
agttccaggcaggatgaatc

SEQ ID NO: 17028 - RNA, 20 nt, synthetic construct
  source 1..20: mol_type = other RNA
agttggacccgataaaatac

SEQ ID NO: 17029 - RNA, 20 nt, synthetic construct
  source 1..20: mol_type = other RNA
agtttacagcaatcacctgt

SEQ ID NO: 17030 - RNA, 20 nt, synthetic construct
  source 1..20: mol_type = other RNA
agttttggaagcttaaataa

SEQ ID NO: 17031 - RNA, 20 nt, synthetic construct
  source 1..20: mol_type = other RNA
ataaaatacaacagggatag

SEQ ID NO: 17032 - RNA, 20 nt, synthetic construct
  source 1..20: mol_type = other RNA
ataaagccagtaactggttg

SEQ ID NO: 17033 - RNA, 20 nt, synthetic construct
  source 1..20: mol_type = other RNA
ataacattaaaagctaagag

SEQ ID NO: 17034 - RNA, 20 nt, synthetic construct
  source 1..20: mol_type = other RNA
ataactctccaaaagtcata

SEQ ID NO: 17035 - RNA, 20 nt, synthetic construct
  source 1..20: mol_type = other RNA
ataagaacatattaaatgcc

SEQ ID NO: 17036 - RNA, 20 nt, synthetic construct
  source 1..20: mol_type = other RNA
ataatattttcttcccactt

SEQ ID NO: 17037 - RNA, 20 nt, synthetic construct
  source 1..20: mol_type = other RNA
ataatggaaagtatgttctg

SEQ ID NO: 17038 - RNA, 20 nt, synthetic construct
  source 1..20: mol_type = other RNA
atacaacagggataggtgag

SEQ ID NO: 17039 - RNA, 20 nt, synthetic construct
  source 1..20: mol_type = other RNA
atacaagagctggcaaatac

SEQ ID NO: 17040 - RNA, 20 nt, synthetic construct
  source 1..20: mol_type = other RNA
atacacatatatttagtgtc

SEQ ID NO: 17041 - RNA, 20 nt, synthetic construct
  source 1..20: mol_type = other RNA
atacacttatattcagggta

SEQ ID NO: 17042 - RNA, 20 nt, synthetic construct
  source 1..20: mol_type = other RNA
atacagattgacactaaata

SEQ ID NO: 17043 - RNA, 20 nt, synthetic construct
  source 1..20: mol_type = other RNA
ataccttaaatggttgagtt

SEQ ID NO: 17044 - RNA, 20 nt, synthetic construct
  source 1..20: mol_type = other RNA
atacttgtcctcttcttaga

SEQ ID NO: 17045 - RNA, 20 nt, synthetic construct
  source 1..20: mol_type = other RNA
atactttccattatgatcaa

SEQ ID NO: 17046 - RNA, 20 nt, synthetic construct
  source 1..20: mol_type = other RNA
atagggtgtttctagagaga

SEQ ID NO: 17047 - RNA, 20 nt, synthetic construct
  source 1..20: mol_type = other RNA
ataggtgaggactatggcaa

SEQ ID NO: 17048 - RNA, 20 nt, synthetic construct
  source 1..20: mol_type = other RNA
atagtcctcacctatccctg

SEQ ID NO: 17049 - RNA, 20 nt, synthetic construct
  source 1..20: mol_type = other RNA
atatacagattgacactaaa

SEQ ID NO: 17050 - RNA, 20 nt, synthetic construct
  source 1..20: mol_type = other RNA
atatatctctctagaaacac

SEQ ID NO: 17051 - RNA, 20 nt, synthetic construct
  source 1..20: mol_type = other RNA
atatatctggtcaaggtggc

SEQ ID NO: 17052 - RNA, 20 nt, synthetic construct
  source 1..20: mol_type = other RNA
atatattcccaacctggcta

SEQ ID NO: 17053 - RNA, 20 nt, synthetic construct
  source 1..20: mol_type = other RNA
atatattgcctaatgtttca

SEQ ID NO: 17054 - RNA, 20 nt, synthetic construct
  source 1..20: mol_type = other RNA
atatatttagtgtcaatctg

SEQ ID NO: 17055 - RNA, 20 nt, synthetic construct
  source 1..20: mol_type = other RNA
atatctctctagaaacaccc

SEQ ID NO: 17056 - RNA, 20 nt, synthetic construct
  source 1..20: mol_type = other RNA
atatctggtcaaggtggcct

SEQ ID NO: 17057 - RNA, 20 nt, synthetic construct
  source 1..20: mol_type = other RNA
atatgccagacccctctctg

SEQ ID NO: 17058 - RNA, 20 nt, synthetic construct
  source 1..20: mol_type = other RNA
atattaaatgcctcagggat

SEQ ID NO: 17059 - RNA, 20 nt, synthetic construct
  source 1..20: mol_type = other RNA
atattcagggtacatgatca

SEQ ID NO: 17060 - RNA, 20 nt, synthetic construct
  source 1..20: mol_type = other RNA
atattcccaacctggctagt

SEQ ID NO: 17061 - RNA, 20 nt, synthetic construct
  source 1..20: mol_type = other RNA
atattgcctaatgtttcaga

SEQ ID NO: 17062 - RNA, 20 nt, synthetic construct
  source 1..20: mol_type = other RNA
atatttagtagcactaacac

SEQ ID NO: 17063 - RNA, 20 nt, synthetic construct
  source 1..20: mol_type = other RNA
atatttagtgtcaatctgta

SEQ ID NO: 17064 - RNA, 20 nt, synthetic construct
  source 1..20: mol_type = other RNA
atattttcttcccacttccc

SEQ ID NO: 17065 - RNA, 20 nt, synthetic construct
  source 1..20: mol_type = other RNA
atcaaatggagtaatgcatg

SEQ ID NO: 17066 - RNA, 20 nt, synthetic construct
  source 1..20: mol_type = other RNA
atcaagaggtggattgggga

SEQ ID NO: 17067 - RNA, 20 nt, synthetic construct
  source 1..20: mol_type = other RNA
atcacctgtggatgctaatt

SEQ ID NO: 17068 - RNA, 20 nt, synthetic construct
  source 1..20: mol_type = other RNA
atcactaaaaggcagctact

SEQ ID NO: 17069 - RNA, 20 nt, synthetic construct
  source 1..20: mol_type = other RNA
atcactgtaatcttttctaa

SEQ ID NO: 17070 - RNA, 20 nt, synthetic construct
  source 1..20: mol_type = other RNA
atcagacaggctgggtttga

SEQ ID NO: 17071 - RNA, 20 nt, synthetic construct
  source 1..20: mol_type = other RNA
atcagagcacagattcatcc

SEQ ID NO: 17072 - RNA, 20 nt, synthetic construct
  source 1..20: mol_type = other RNA
atcaggtcttcattagattc

SEQ ID NO: 17073 - RNA, 20 nt, synthetic construct
  source 1..20: mol_type = other RNA
atcataatggaaagtatgtt

SEQ ID NO: 17074 - RNA, 20 nt, synthetic construct
  source 1..20: mol_type = other RNA
atcatgtaccctgaatataa

SEQ ID NO: 17075 - RNA, 20 nt, synthetic construct
  source 1..20: mol_type = other RNA
atcattaaggaaaggctact

SEQ ID NO: 17076 - RNA, 20 nt, synthetic construct
  source 1..20: mol_type = other RNA
atccacaggtgattgctgta

SEQ ID NO: 17077 - RNA, 20 nt, synthetic construct
  source 1..20: mol_type = other RNA
atccacctcttgatggggct

SEQ ID NO: 17078 - RNA, 20 nt, synthetic construct
  source 1..20: mol_type = other RNA
atccatggggaagtgggaag

SEQ ID NO: 17079 - RNA, 20 nt, synthetic construct
  source 1..20: mol_type = other RNA
atcccactgtcacatgcatt

SEQ ID NO: 17080 - RNA, 20 nt, synthetic construct
  source 1..20: mol_type = other RNA
atccctgaggcatttaatat

SEQ ID NO: 17081 - RNA, 20 nt, synthetic construct
  source 1..20: mol_type = other RNA
atccctgttgtattttatcg

SEQ ID NO: 17082 - RNA, 20 nt, synthetic construct
  source 1..20: mol_type = other RNA
atcctgcctggaactctctg

SEQ ID NO: 17083 - RNA, 20 nt, synthetic construct
  source 1..20: mol_type = other RNA
atcgggtccaactcaaccat

SEQ ID NO: 17084 - RNA, 20 nt, synthetic construct
  source 1..20: mol_type = other RNA
atctaatgaagacctgattt

SEQ ID NO: 17085 - RNA, 20 nt, synthetic construct
  source 1..20: mol_type = other RNA
atctctctagaaacacccta

SEQ ID NO: 17086 - RNA, 20 nt, synthetic construct
  source 1..20: mol_type = other RNA
atctgagcttctaataataa

SEQ ID NO: 17087 - RNA, 20 nt, synthetic construct
  source 1..20: mol_type = other RNA
atctggtcaaggtggcctgg

SEQ ID NO: 17088 - RNA, 20 nt, synthetic construct
  source 1..20: mol_type = other RNA
atctgtatatttagtagcac

SEQ ID NO: 17089 - RNA, 20 nt, synthetic construct
  source 1..20: mol_type = other RNA
atctgtgctctgatccctga

SEQ ID NO: 17090 - RNA, 20 nt, synthetic construct
  source 1..20: mol_type = other RNA
atcttgccgccttccctcaa

SEQ ID NO: 17091 - RNA, 20 nt, synthetic construct
  source 1..20: mol_type = other RNA
atcttttctaagaagaggac

SEQ ID NO: 17092 - RNA, 20 nt, synthetic construct
  source 1..20: mol_type = other RNA
atgaaattaggtacaaagtc

SEQ ID NO: 17093 - RNA, 20 nt, synthetic construct
  source 1..20: mol_type = other RNA
atgaagagaagtgttagtgc

SEQ ID NO: 17094 - RNA, 20 nt, synthetic construct
  source 1..20: mol_type = other RNA
atgaatctgtgctctgatcc

SEQ ID NO: 17095 - RNA, 20 nt, synthetic construct
  source 1..20: mol_type = other RNA
atgactagaccatccatggg

SEQ ID NO: 17096 - RNA, 20 nt, synthetic construct
  source 1..20: mol_type = other RNA
atgacttttggagagttatt

SEQ ID NO: 17097 - RNA, 20 nt, synthetic construct
  source 1..20: mol_type = other RNA
atgagaggcatgactagacc

SEQ ID NO: 17098 - RNA, 20 nt, synthetic construct
  source 1..20: mol_type = other RNA
atgagctaaaaaacaaagaa

SEQ ID NO: 17099 - RNA, 20 nt, synthetic construct
  source 1..20: mol_type = other RNA
atgatagggtgtttctagag

SEQ ID NO: 17100 - RNA, 20 nt, synthetic construct
  source 1..20: mol_type = other RNA
atgatcaaatggagtaatgc

SEQ ID NO: 17101 - RNA, 20 nt, synthetic construct
  source 1..20: mol_type = other RNA
atgatcactaaaaggcagct

SEQ ID NO: 17102 - RNA, 20 nt, synthetic construct
  source 1..20: mol_type = other RNA
atgcaaagagctctcttagc

SEQ ID NO: 17103 - RNA, 20 nt, synthetic construct
  source 1..20: mol_type = other RNA
atgcatacaagagctggcaa

SEQ ID NO: 17104 - RNA, 20 nt, synthetic construct
  source 1..20: mol_type = other RNA
atgcatgtgacagtgggatt

SEQ ID NO: 17105 - RNA, 20 nt, synthetic construct
  source 1..20: mol_type = other RNA
atgcattactccatttgatc

SEQ ID NO: 17106 - RNA, 20 nt, synthetic construct
  source 1..20: mol_type = other RNA
atgcatttaggttttgtttc

SEQ ID NO: 17107 - RNA, 20 nt, synthetic construct
  source 1..20: mol_type = other RNA
atgccagacccctctctgac

SEQ ID NO: 17108 - RNA, 20 nt, synthetic construct
  source 1..20: mol_type = other RNA
atgcccacagtaaaacaaaa

SEQ ID NO: 17109 - RNA, 20 nt, synthetic construct
  source 1..20: mol_type = other RNA
atgcctcagggatcagagca

SEQ ID NO: 17110 - RNA, 20 nt, synthetic construct
  source 1..20: mol_type = other RNA
atgcctctcattttggaaag

SEQ ID NO: 17111 - RNA, 20 nt, synthetic construct
  source 1..20: mol_type = other RNA
atgctaattaaaacgcaaat

SEQ ID NO: 17112 - RNA, 20 nt, synthetic construct
  source 1..20: mol_type = other RNA
atgctctcacaaaatcttgc

SEQ ID NO: 17113 - RNA, 20 nt, synthetic construct
  source 1..20: mol_type = other RNA
atggaaagtatgttctgtcc

SEQ ID NO: 17114 - RNA, 20 nt, synthetic construct
  source 1..20: mol_type = other RNA
atggagtaatgcatgtgaca

SEQ ID NO: 17115 - RNA, 20 nt, synthetic construct
  source 1..20: mol_type = other RNA
atggatggtctagtcatgcc

SEQ ID NO: 17116 - RNA, 20 nt, synthetic construct
  source 1..20: mol_type = other RNA
atggcaaatgggacagaaca

SEQ ID NO: 17117 - RNA, 20 nt, synthetic construct
  source 1..20: mol_type = other RNA
atgggacagaacatactttc

SEQ ID NO: 17118 - RNA, 20 nt, synthetic construct
  source 1..20: mol_type = other RNA
atggggaagtgggaagaaaa

SEQ ID NO: 17119 - RNA, 20 nt, synthetic construct
  source 1..20: mol_type = other RNA
atggggctagtagcctttcc

SEQ ID NO: 17120 - RNA, 20 nt, synthetic construct
  source 1..20: mol_type = other RNA
atggtctagtcatgcctctc

SEQ ID NO: 17121 - RNA, 20 nt, synthetic construct
  source 1..20: mol_type = other RNA
atggttgagttggacccgat

SEQ ID NO: 17122 - RNA, 20 nt, synthetic construct
  source 1..20: mol_type = other RNA
atgtaccctgaatataagtg

SEQ ID NO: 17123 - RNA, 20 nt, synthetic construct
  source 1..20: mol_type = other RNA
atgtgacagtgggatttgcg

SEQ ID NO: 17124 - RNA, 20 nt, synthetic construct
  source 1..20: mol_type = other RNA
atgttctgtcccatttgcca

SEQ ID NO: 17125 - RNA, 20 nt, synthetic construct
  source 1..20: mol_type = other RNA
atgttcttattattagaagc

SEQ ID NO: 17126 - RNA, 20 nt, synthetic construct
  source 1..20: mol_type = other RNA
atgtttcagaaacagtactt

SEQ ID NO: 17127 - RNA, 20 nt, synthetic construct
  source 1..20: mol_type = other RNA
attaaaacgcaaatcccact

SEQ ID NO: 17128 - RNA, 20 nt, synthetic construct
  source 1..20: mol_type = other RNA
attaaaagctaagagagctc

SEQ ID NO: 17129 - RNA, 20 nt, synthetic construct
  source 1..20: mol_type = other RNA
attaaatgcctcagggatca

SEQ ID NO: 17130 - RNA, 20 nt, synthetic construct
  source 1..20: mol_type = other RNA
attaaggaaaggctactagc

SEQ ID NO: 17131 - RNA, 20 nt, synthetic construct
  source 1..20: mol_type = other RNA
attaatttatgcccacagta

SEQ ID NO: 17132 - RNA, 20 nt, synthetic construct
  source 1..20: mol_type = other RNA
attacagtgatgctctcaca

SEQ ID NO: 17133 - RNA, 20 nt, synthetic construct
  source 1..20: mol_type = other RNA
attactccatttgatcataa

SEQ ID NO: 17134 - RNA, 20 nt, synthetic construct
  source 1..20: mol_type = other RNA
attagaagctcagatgcaaa

SEQ ID NO: 17135 - RNA, 20 nt, synthetic construct
  source 1..20: mol_type = other RNA
attagattccccaatccacc

SEQ ID NO: 17136 - RNA, 20 nt, synthetic construct
  source 1..20: mol_type = other RNA
attagcatccacaggtgatt

SEQ ID NO: 17137 - RNA, 20 nt, synthetic construct
  source 1..20: mol_type = other RNA
attaggcaatatattcccaa

SEQ ID NO: 17138 - RNA, 20 nt, synthetic construct
  source 1..20: mol_type = other RNA
attaggtacaaagtcagaga

SEQ ID NO: 17139 - RNA, 20 nt, synthetic construct
  source 1..20: mol_type = other RNA
attatgatcaaatggagtaa

SEQ ID NO: 17140 - RNA, 20 nt, synthetic construct
  source 1..20: mol_type = other RNA
attattagaagctcagatgc

SEQ ID NO: 17141 - RNA, 20 nt, synthetic construct
  source 1..20: mol_type = other RNA
attcaaacccagcctgtctg

SEQ ID NO: 17142 - RNA, 20 nt, synthetic construct
  source 1..20: mol_type = other RNA
attcagggtacatgatcact

SEQ ID NO: 17143 - RNA, 20 nt, synthetic construct
  source 1..20: mol_type = other RNA
attcatcctgcctggaactc

SEQ ID NO: 17144 - RNA, 20 nt, synthetic construct
  source 1..20: mol_type = other RNA
attcccaacctggctagttt

SEQ ID NO: 17145 - RNA, 20 nt, synthetic construct
  source 1..20: mol_type = other RNA
attccccaatccacctcttg

SEQ ID NO: 17146 - RNA, 20 nt, synthetic construct
  source 1..20: mol_type = other RNA
attgaaaatgaagagaagtg

SEQ ID NO: 17147 - RNA, 20 nt, synthetic construct
  source 1..20: mol_type = other RNA
attgacactaaatatatgtg

SEQ ID NO: 17148 - RNA, 20 nt, synthetic construct
  source 1..20: mol_type = other RNA
attgcctaatgtttcagaaa

SEQ ID NO: 17149 - RNA, 20 nt, synthetic construct
  source 1..20: mol_type = other RNA
attgctgtaaactagccagg

SEQ ID NO: 17150 - RNA, 20 nt, synthetic construct
  source 1..20: mol_type = other RNA
attggggaatctaatgaaga

SEQ ID NO: 17151 - RNA, 20 nt, synthetic construct
  source 1..20: mol_type = other RNA
atttaagcttccaaaactta

SEQ ID NO: 17152 - RNA, 20 nt, synthetic construct
  source 1..20: mol_type = other RNA
atttaaggtatttgccagct

SEQ ID NO: 17153 - RNA, 20 nt, synthetic construct
  source 1..20: mol_type = other RNA
atttaggttttgtttctttg

SEQ ID NO: 17154 - RNA, 20 nt, synthetic construct
  source 1..20: mol_type = other RNA
atttagtagcactaacactt

SEQ ID NO: 17155 - RNA, 20 nt, synthetic construct
  source 1..20: mol_type = other RNA
atttagtgtcaatctgtata

SEQ ID NO: 17156 - RNA, 20 nt, synthetic construct
  source 1..20: mol_type = other RNA
atttatgcccacagtaaaac

SEQ ID NO: 17157 - RNA, 20 nt, synthetic construct
  source 1..20: mol_type = other RNA
atttcatgagctaaaaaaca

SEQ ID NO: 17158 - RNA, 20 nt, synthetic construct
  source 1..20: mol_type = other RNA
atttgatcataatggaaagt

SEQ ID NO: 17159 - RNA, 20 nt, synthetic construct
  source 1..20: mol_type = other RNA
atttgccagctcttgtatgc

SEQ ID NO: 17160 - RNA, 20 nt, synthetic construct
  source 1..20: mol_type = other RNA
atttgccatagtcctcacct

SEQ ID NO: 17161 - RNA, 20 nt, synthetic construct
  source 1..20: mol_type = other RNA
atttgcgttttaattagcat

SEQ ID NO: 17162 - RNA, 20 nt, synthetic construct
  source 1..20: mol_type = other RNA
atttgggctcaaccagttac

SEQ ID NO: 17163 - RNA, 20 nt, synthetic construct
  source 1..20: mol_type = other RNA
attttatcgggtccaactca

SEQ ID NO: 17164 - RNA, 20 nt, synthetic construct
  source 1..20: mol_type = other RNA
attttcttcccacttcccca

SEQ ID NO: 17165 - RNA, 20 nt, synthetic construct
  source 1..20: mol_type = other RNA
attttggaaagtactgtttc

SEQ ID NO: 17166 - RNA, 20 nt, synthetic construct
  source 1..20: mol_type = other RNA
attttgtgagagcatcactg

SEQ ID NO: 17167 - RNA, 20 nt, synthetic construct
  source 1..20: mol_type = other RNA
atttttcagttaagttttgg

SEQ ID NO: 17168 - RNA, 20 nt, synthetic construct
  source 1..20: mol_type = other RNA
caaaaacaaaacccacacac

SEQ ID NO: 17169 - RNA, 20 nt, synthetic construct
  source 1..20: mol_type = other RNA
caaaacctaaatgcatacaa

SEQ ID NO: 17170 - RNA, 20 nt, synthetic construct
  source 1..20: mol_type = other RNA
caaaagtcataaagccagta

SEQ ID NO: 17171 - RNA, 20 nt, synthetic construct
  source 1..20: mol_type = other RNA
caaaatcttgccgccttccc

SEQ ID NO: 17172 - RNA, 20 nt, synthetic construct
  source 1..20: mol_type = other RNA
caaaatgagaggcatgacta

SEQ ID NO: 17173 - RNA, 20 nt, synthetic construct
  source 1..20: mol_type = other RNA
caaacagagagttccaggca

SEQ ID NO: 17174 - RNA, 20 nt, synthetic construct
  source 1..20: mol_type = other RNA
caaacccagcctgtctgata

SEQ ID NO: 17175 - RNA, 20 nt, synthetic construct
  source 1..20: mol_type = other RNA
caaagaaacaaaacctaaat

SEQ ID NO: 17176 - RNA, 20 nt, synthetic construct
  source 1..20: mol_type = other RNA
caaagagctctcttagcttt

SEQ ID NO: 17177 - RNA, 20 nt, synthetic construct
  source 1..20: mol_type = other RNA
caaagtcagagaggggtctg

SEQ ID NO: 17178 - RNA, 20 nt, synthetic construct
  source 1..20: mol_type = other RNA
caaataccttaaatggttga

SEQ ID NO: 17179 - RNA, 20 nt, synthetic construct
  source 1..20: mol_type = other RNA
caaatcccactgtcacatgc

SEQ ID NO: 17180 - RNA, 20 nt, synthetic construct
  source 1..20: mol_type = other RNA
caaatggagtaatgcatgtg

SEQ ID NO: 17181 - RNA, 20 nt, synthetic construct
  source 1..20: mol_type = other RNA
caaatgggacagaacatact

SEQ ID NO: 17182 - RNA, 20 nt, synthetic construct
  source 1..20: mol_type = other RNA
caaattcaaacccagcctgt

SEQ ID NO: 17183 - RNA, 20 nt, synthetic construct
  source 1..20: mol_type = other RNA
caacagggataggtgaggac

SEQ ID NO: 17184 - RNA, 20 nt, synthetic construct
  source 1..20: mol_type = other RNA
caaccagttactggctttat

SEQ ID NO: 17185 - RNA, 20 nt, synthetic construct
  source 1..20: mol_type = other RNA
caaccatttaaggtatttgc

SEQ ID NO: 17186 - RNA, 20 nt, synthetic construct
  source 1..20: mol_type = other RNA
caacctggctagtttacagc

SEQ ID NO: 17187 - RNA, 20 nt, synthetic construct
  source 1..20: mol_type = other RNA
caactcaaccatttaaggta

SEQ ID NO: 17188 - RNA, 20 nt, synthetic construct
  source 1..20: mol_type = other RNA
caagagctggcaaatacctt

SEQ ID NO: 17189 - RNA, 20 nt, synthetic construct
  source 1..20: mol_type = other RNA
caagaggtggattggggaat

SEQ ID NO: 17190 - RNA, 20 nt, synthetic construct
  source 1..20: mol_type = other RNA
caagattttgtgagagcatc

SEQ ID NO: 17191 - RNA, 20 nt, synthetic construct
  source 1..20: mol_type = other RNA
caaggaggagtagctgcctt

SEQ ID NO: 17192 - RNA, 20 nt, synthetic construct
  source 1..20: mol_type = other RNA
caaggtggcctggtactcct

SEQ ID NO: 17193 - RNA, 20 nt, synthetic construct
  source 1..20: mol_type = other RNA
caagtatcagacaggctggg

SEQ ID NO: 17194 - RNA, 20 nt, synthetic construct
  source 1..20: mol_type = other RNA
caatatattcccaacctggc

SEQ ID NO: 17195 - RNA, 20 nt, synthetic construct
  source 1..20: mol_type = other RNA
caatcacctgtggatgctaa

SEQ ID NO: 17196 - RNA, 20 nt, synthetic construct
  source 1..20: mol_type = other RNA
caatccacctcttgatgggg

SEQ ID NO: 17197 - RNA, 20 nt, synthetic construct
  source 1..20: mol_type = other RNA
caatctgtatatttagtagc

SEQ ID NO: 17198 - RNA, 20 nt, synthetic construct
  source 1..20: mol_type = other RNA
cacaaaatcttgccgccttc

SEQ ID NO: 17199 - RNA, 20 nt, synthetic construct
  source 1..20: mol_type = other RNA
cacagattcatcctgcctgg

SEQ ID NO: 17200 - RNA, 20 nt, synthetic construct
  source 1..20: mol_type = other RNA
cacagcctcccagacaagga

SEQ ID NO: 17201 - RNA, 20 nt, synthetic construct
  source 1..20: mol_type = other RNA
cacaggtgattgctgtaaac

SEQ ID NO: 17202 - RNA, 20 nt, synthetic construct
  source 1..20: mol_type = other RNA
cacagtaaaacaaaaacaaa

SEQ ID NO: 17203 - RNA, 20 nt, synthetic construct
  source 1..20: mol_type = other RNA
cacatatatttagtgtcaat

SEQ ID NO: 17204 - RNA, 20 nt, synthetic construct
  source 1..20: mol_type = other RNA
cacatgcattactccatttg

SEQ ID NO: 17205 - RNA, 20 nt, synthetic construct
  source 1..20: mol_type = other RNA
caccctatcattaaggaaag

SEQ ID NO: 17206 - RNA, 20 nt, synthetic construct
  source 1..20: mol_type = other RNA
cacctatccctgttgtattt

SEQ ID NO: 17207 - RNA, 20 nt, synthetic construct
  source 1..20: mol_type = other RNA
cacctcttgatggggctagt

SEQ ID NO: 17208 - RNA, 20 nt, synthetic construct
  source 1..20: mol_type = other RNA
cacctgtggatgctaattaa

SEQ ID NO: 17209 - RNA, 20 nt, synthetic construct
  source 1..20: mol_type = other RNA
caccttgaccagatatatct

SEQ ID NO: 17210 - RNA, 20 nt, synthetic construct
  source 1..20: mol_type = other RNA
cactaaaaggcagctactcc

SEQ ID NO: 17211 - RNA, 20 nt, synthetic construct
  source 1..20: mol_type = other RNA
cactaacacttctcttcatt

SEQ ID NO: 17212 - RNA, 20 nt, synthetic construct
  source 1..20: mol_type = other RNA
cactgtaatcttttctaaga

SEQ ID NO: 17213 - RNA, 20 nt, synthetic construct
  source 1..20: mol_type = other RNA
cactgtcacatgcattactc

SEQ ID NO: 17214 - RNA, 20 nt, synthetic construct
  source 1..20: mol_type = other RNA
cacttatattcagggtacat

SEQ ID NO: 17215 - RNA, 20 nt, synthetic construct
  source 1..20: mol_type = other RNA
cacttccccatggatggtct

SEQ ID NO: 17216 - RNA, 20 nt, synthetic construct
  source 1..20: mol_type = other RNA
cacttctcttcattttcaat

SEQ ID NO: 17217 - RNA, 20 nt, synthetic construct
  source 1..20: mol_type = other RNA
cagaaacagtactttccaaa

SEQ ID NO: 17218 - RNA, 20 nt, synthetic construct
  source 1..20: mol_type = other RNA
cagaacatactttccattat

SEQ ID NO: 17219 - RNA, 20 nt, synthetic construct
  source 1..20: mol_type = other RNA
cagacaaggaggagtagctg

SEQ ID NO: 17220 - RNA, 20 nt, synthetic construct
  source 1..20: mol_type = other RNA
cagacaggctgggtttgaat

SEQ ID NO: 17221 - RNA, 20 nt, synthetic construct
  source 1..20: mol_type = other RNA
cagacccctctctgactttg

SEQ ID NO: 17222 - RNA, 20 nt, synthetic construct
  source 1..20: mol_type = other RNA
cagagagttccaggcaggat

SEQ ID NO: 17223 - RNA, 20 nt, synthetic construct
  source 1..20: mol_type = other RNA
cagagcacagattcatcctg

SEQ ID NO: 17224 - RNA, 20 nt, synthetic construct
  source 1..20: mol_type = other RNA
cagatatatctctctagaaa

SEQ ID NO: 17225 - RNA, 20 nt, synthetic construct
  source 1..20: mol_type = other RNA
cagatgcaaagagctctctt

SEQ ID NO: 17226 - RNA, 20 nt, synthetic construct
  source 1..20: mol_type = other RNA
cagattcatcctgcctggaa

SEQ ID NO: 17227 - RNA, 20 nt, synthetic construct
  source 1..20: mol_type = other RNA
cagattgacactaaatatat

SEQ ID NO: 17228 - RNA, 20 nt, synthetic construct
  source 1..20: mol_type = other RNA
cagcaatcacctgtggatgc

SEQ ID NO: 17229 - RNA, 20 nt, synthetic construct
  source 1..20: mol_type = other RNA
cagcctcccagacaaggagg

SEQ ID NO: 17230 - RNA, 20 nt, synthetic construct
  source 1..20: mol_type = other RNA
cagcctgtctgatacttgtc

SEQ ID NO: 17231 - RNA, 20 nt, synthetic construct
  source 1..20: mol_type = other RNA
cagctactcctccttgtctg

SEQ ID NO: 17232 - RNA, 20 nt, synthetic construct
  source 1..20: mol_type = other RNA
cagctcttgtatgcatttag

SEQ ID NO: 17233 - RNA, 20 nt, synthetic construct
  source 1..20: mol_type = other RNA
caggatgaatctgtgctctg

SEQ ID NO: 17234 - RNA, 20 nt, synthetic construct
  source 1..20: mol_type = other RNA
caggcaggatgaatctgtgc

SEQ ID NO: 17235 - RNA, 20 nt, synthetic construct
  source 1..20: mol_type = other RNA
caggccaccttgaccagata

SEQ ID NO: 17236 - RNA, 20 nt, synthetic construct
  source 1..20: mol_type = other RNA
caggctgggtttgaatttgg

SEQ ID NO: 17237 - RNA, 20 nt, synthetic construct
  source 1..20: mol_type = other RNA
cagggataggtgaggactat

SEQ ID NO: 17238 - RNA, 20 nt, synthetic construct
  source 1..20: mol_type = other RNA
cagggatcagagcacagatt

SEQ ID NO: 17239 - RNA, 20 nt, synthetic construct
  source 1..20: mol_type = other RNA
cagggtacatgatcactaaa

SEQ ID NO: 17240 - RNA, 20 nt, synthetic construct
  source 1..20: mol_type = other RNA
caggtcttcattagattccc

SEQ ID NO: 17241 - RNA, 20 nt, synthetic construct
  source 1..20: mol_type = other RNA
caggtgattgctgtaaacta

SEQ ID NO: 17242 - RNA, 20 nt, synthetic construct
  source 1..20: mol_type = other RNA
caggttgggaatatattgcc

SEQ ID NO: 17243 - RNA, 20 nt, synthetic construct
  source 1..20: mol_type = other RNA
cagtaaaacaaaaacaaaac

SEQ ID NO: 17244 - RNA, 20 nt, synthetic construct
  source 1..20: mol_type = other RNA
cagtaactggttgagcccaa

SEQ ID NO: 17245 - RNA, 20 nt, synthetic construct
  source 1..20: mol_type = other RNA
cagtactttccaaaatgaga

SEQ ID NO: 17246 - RNA, 20 nt, synthetic construct
  source 1..20: mol_type = other RNA
cagtgatgctctcacaaaat

SEQ ID NO: 17247 - RNA, 20 nt, synthetic construct
  source 1..20: mol_type = other RNA
cagtgggatttgcgttttaa

SEQ ID NO: 17248 - RNA, 20 nt, synthetic construct
  source 1..20: mol_type = other RNA
cagttaagttttggaagctt

SEQ ID NO: 17249 - RNA, 20 nt, synthetic construct
  source 1..20: mol_type = other RNA
cagttactggctttatgact

SEQ ID NO: 17250 - RNA, 20 nt, synthetic construct
  source 1..20: mol_type = other RNA
cataaagccagtaactggtt

SEQ ID NO: 17251 - RNA, 20 nt, synthetic construct
  source 1..20: mol_type = other RNA
cataacattaaaagctaaga

SEQ ID NO: 17252 - RNA, 20 nt, synthetic construct
  source 1..20: mol_type = other RNA
cataatggaaagtatgttct

SEQ ID NO: 17253 - RNA, 20 nt, synthetic construct
  source 1..20: mol_type = other RNA
catacaagagctggcaaata

SEQ ID NO: 17254 - RNA, 20 nt, synthetic construct
  source 1..20: mol_type = other RNA
catactttccattatgatca

SEQ ID NO: 17255 - RNA, 20 nt, synthetic construct
  source 1..20: mol_type = other RNA
catagtcctcacctatccct

SEQ ID NO: 17256 - RNA, 20 nt, synthetic construct
  source 1..20: mol_type = other RNA
catatatttagtgtcaatct

SEQ ID NO: 17257 - RNA, 20 nt, synthetic construct
  source 1..20: mol_type = other RNA
catattaaatgcctcaggga

SEQ ID NO: 17258 - RNA, 20 nt, synthetic construct
  source 1..20: mol_type = other RNA
catcaagaggtggattgggg

SEQ ID NO: 17259 - RNA, 20 nt, synthetic construct
  source 1..20: mol_type = other RNA
catcactgtaatcttttcta

SEQ ID NO: 17260 - RNA, 20 nt, synthetic construct
  source 1..20: mol_type = other RNA
catccacaggtgattgctgt

SEQ ID NO: 17261 - RNA, 20 nt, synthetic construct
  source 1..20: mol_type = other RNA
catccatggggaagtgggaa

SEQ ID NO: 17262 - RNA, 20 nt, synthetic construct
  source 1..20: mol_type = other RNA
catcctgcctggaactctct

SEQ ID NO: 17263 - RNA, 20 nt, synthetic construct
  source 1..20: mol_type = other RNA
catctgagcttctaataata

SEQ ID NO: 17264 - RNA, 20 nt, synthetic construct
  source 1..20: mol_type = other RNA
catgaaattaggtacaaagt

SEQ ID NO: 17265 - RNA, 20 nt, synthetic construct
  source 1..20: mol_type = other RNA
catgactagaccatccatgg

SEQ ID NO: 17266 - RNA, 20 nt, synthetic construct
  source 1..20: mol_type = other RNA
catgagctaaaaaacaaaga

SEQ ID NO: 17267 - RNA, 20 nt, synthetic construct
  source 1..20: mol_type = other RNA
catgatcactaaaaggcagc

SEQ ID NO: 17268 - RNA, 20 nt, synthetic construct
  source 1..20: mol_type = other RNA
catgcattactccatttgat

SEQ ID NO: 17269 - RNA, 20 nt, synthetic construct
  source 1..20: mol_type = other RNA
catgcctctcattttggaaa

SEQ ID NO: 17270 - RNA, 20 nt, synthetic construct
  source 1..20: mol_type = other RNA
catggatggtctagtcatgc

SEQ ID NO: 17271 - RNA, 20 nt, synthetic construct
  source 1..20: mol_type = other RNA
catggggaagtgggaagaaa

SEQ ID NO: 17272 - RNA, 20 nt, synthetic construct
  source 1..20: mol_type = other RNA
catgtaccctgaatataagt

SEQ ID NO: 17273 - RNA, 20 nt, synthetic construct
  source 1..20: mol_type = other RNA
catgtgacagtgggatttgc

SEQ ID NO: 17274 - RNA, 20 nt, synthetic construct
  source 1..20: mol_type = other RNA
cattaaaagctaagagagct

SEQ ID NO: 17275 - RNA, 20 nt, synthetic construct
  source 1..20: mol_type = other RNA
cattaaggaaaggctactag

SEQ ID NO: 17276 - RNA, 20 nt, synthetic construct
  source 1..20: mol_type = other RNA
cattactccatttgatcata

SEQ ID NO: 17277 - RNA, 20 nt, synthetic construct
  source 1..20: mol_type = other RNA
cattagattccccaatccac

SEQ ID NO: 17278 - RNA, 20 nt, synthetic construct
  source 1..20: mol_type = other RNA
cattaggcaatatattccca

SEQ ID NO: 17279 - RNA, 20 nt, synthetic construct
  source 1..20: mol_type = other RNA
cattatgatcaaatggagta

SEQ ID NO: 17280 - RNA, 20 nt, synthetic construct
  source 1..20: mol_type = other RNA
cattgaaaatgaagagaagt

SEQ ID NO: 17281 - RNA, 20 nt, synthetic construct
  source 1..20: mol_type = other RNA
catttaaggtatttgccagc

SEQ ID NO: 17282 - RNA, 20 nt, synthetic construct
  source 1..20: mol_type = other RNA
catttaggttttgtttcttt

SEQ ID NO: 17283 - RNA, 20 nt, synthetic construct
  source 1..20: mol_type = other RNA
catttgatcataatggaaag

SEQ ID NO: 17284 - RNA, 20 nt, synthetic construct
  source 1..20: mol_type = other RNA
catttgccatagtcctcacc

SEQ ID NO: 17285 - RNA, 20 nt, synthetic construct
  source 1..20: mol_type = other RNA
cattttggaaagtactgttt

SEQ ID NO: 17286 - RNA, 20 nt, synthetic construct
  source 1..20: mol_type = other RNA
ccaaaacttaactgaaaaat

SEQ ID NO: 17287 - RNA, 20 nt, synthetic construct
  source 1..20: mol_type = other RNA
ccaaaagtcataaagccagt

SEQ ID NO: 17288 - RNA, 20 nt, synthetic construct
  source 1..20: mol_type = other RNA
ccaaaatgagaggcatgact

SEQ ID NO: 17289 - RNA, 20 nt, synthetic construct
  source 1..20: mol_type = other RNA
ccaaattcaaacccagcctg

SEQ ID NO: 17290 - RNA, 20 nt, synthetic construct
  source 1..20: mol_type = other RNA
ccaacctggctagtttacag

SEQ ID NO: 17291 - RNA, 20 nt, synthetic construct
  source 1..20: mol_type = other RNA
ccaactcaaccatttaaggt

SEQ ID NO: 17292 - RNA, 20 nt, synthetic construct
  source 1..20: mol_type = other RNA
ccaatccacctcttgatggg

SEQ ID NO: 17293 - RNA, 20 nt, synthetic construct
  source 1..20: mol_type = other RNA
ccacagcctcccagacaagg

SEQ ID NO: 17294 - RNA, 20 nt, synthetic construct
  source 1..20: mol_type = other RNA
ccacaggtgattgctgtaaa

SEQ ID NO: 17295 - RNA, 20 nt, synthetic construct
  source 1..20: mol_type = other RNA
ccacagtaaaacaaaaacaa

SEQ ID NO: 17296 - RNA, 20 nt, synthetic construct
  source 1..20: mol_type = other RNA
ccacctcttgatggggctag

SEQ ID NO: 17297 - RNA, 20 nt, synthetic construct
  source 1..20: mol_type = other RNA
ccaccttgaccagatatatc

SEQ ID NO: 17298 - RNA, 20 nt, synthetic construct
  source 1..20: mol_type = other RNA
ccactgtcacatgcattact

SEQ ID NO: 17299 - RNA, 20 nt, synthetic construct
  source 1..20: mol_type = other RNA
ccacttccccatggatggtc

SEQ ID NO: 17300 - RNA, 20 nt, synthetic construct
  source 1..20: mol_type = other RNA
ccagacaaggaggagtagct

SEQ ID NO: 17301 - RNA, 20 nt, synthetic construct
  source 1..20: mol_type = other RNA
ccagacccctctctgacttt

SEQ ID NO: 17302 - RNA, 20 nt, synthetic construct
  source 1..20: mol_type = other RNA
ccagatatatctctctagaa

SEQ ID NO: 17303 - RNA, 20 nt, synthetic construct
  source 1..20: mol_type = other RNA
ccagcctgtctgatacttgt

SEQ ID NO: 17304 - RNA, 20 nt, synthetic construct
  source 1..20: mol_type = other RNA
ccagctcttgtatgcattta

SEQ ID NO: 17305 - RNA, 20 nt, synthetic construct
  source 1..20: mol_type = other RNA
ccaggcaggatgaatctgtg

SEQ ID NO: 17306 - RNA, 20 nt, synthetic construct
  source 1..20: mol_type = other RNA
ccaggccaccttgaccagat

SEQ ID NO: 17307 - RNA, 20 nt, synthetic construct
  source 1..20: mol_type = other RNA
ccaggttgggaatatattgc

SEQ ID NO: 17308 - RNA, 20 nt, synthetic construct
  source 1..20: mol_type = other RNA
ccagtaactggttgagccca

SEQ ID NO: 17309 - RNA, 20 nt, synthetic construct
  source 1..20: mol_type = other RNA
ccagttactggctttatgac

SEQ ID NO: 17310 - RNA, 20 nt, synthetic construct
  source 1..20: mol_type = other RNA
ccatagtcctcacctatccc

SEQ ID NO: 17311 - RNA, 20 nt, synthetic construct
  source 1..20: mol_type = other RNA
ccatcaagaggtggattggg

SEQ ID NO: 17312 - RNA, 20 nt, synthetic construct
  source 1..20: mol_type = other RNA
ccatccatggggaagtggga

SEQ ID NO: 17313 - RNA, 20 nt, synthetic construct
  source 1..20: mol_type = other RNA
ccatggatggtctagtcatg

SEQ ID NO: 17314 - RNA, 20 nt, synthetic construct
  source 1..20: mol_type = other RNA
ccatggggaagtgggaagaa

SEQ ID NO: 17315 - RNA, 20 nt, synthetic construct
  source 1..20: mol_type = other RNA
ccattatgatcaaatggagt

SEQ ID NO: 17316 - RNA, 20 nt, synthetic construct
  source 1..20: mol_type = other RNA
ccatttaaggtatttgccag

SEQ ID NO: 17317 - RNA, 20 nt, synthetic construct
  source 1..20: mol_type = other RNA
ccatttgatcataatggaaa

SEQ ID NO: 17318 - RNA, 20 nt, synthetic construct
  source 1..20: mol_type = other RNA
ccatttgccatagtcctcac

SEQ ID NO: 17319 - RNA, 20 nt, synthetic construct
  source 1..20: mol_type = other RNA
cccaaattcaaacccagcct

SEQ ID NO: 17320 - RNA, 20 nt, synthetic construct
  source 1..20: mol_type = other RNA
cccaacctggctagtttaca

SEQ ID NO: 17321 - RNA, 20 nt, synthetic construct
  source 1..20: mol_type = other RNA
cccaatccacctcttgatgg

SEQ ID NO: 17322 - RNA, 20 nt, synthetic construct
  source 1..20: mol_type = other RNA
cccacagcctcccagacaag

SEQ ID NO: 17323 - RNA, 20 nt, synthetic construct
  source 1..20: mol_type = other RNA
cccacagtaaaacaaaaaca

SEQ ID NO: 17324 - RNA, 20 nt, synthetic construct
  source 1..20: mol_type = other RNA
cccactgtcacatgcattac

SEQ ID NO: 17325 - RNA, 20 nt, synthetic construct
  source 1..20: mol_type = other RNA
cccacttccccatggatggt

SEQ ID NO: 17326 - RNA, 20 nt, synthetic construct
  source 1..20: mol_type = other RNA
cccagacaaggaggagtagc

SEQ ID NO: 17327 - RNA, 20 nt, synthetic construct
  source 1..20: mol_type = other RNA
cccagcctgtctgatacttg

SEQ ID NO: 17328 - RNA, 20 nt, synthetic construct
  source 1..20: mol_type = other RNA
cccatcaagaggtggattgg

SEQ ID NO: 17329 - RNA, 20 nt, synthetic construct
  source 1..20: mol_type = other RNA
cccatggatggtctagtcat

SEQ ID NO: 17330 - RNA, 20 nt, synthetic construct
  source 1..20: mol_type = other RNA
cccatttgccatagtcctca

SEQ ID NO: 17331 - RNA, 20 nt, synthetic construct
  source 1..20: mol_type = other RNA
ccccaatccacctcttgatg

SEQ ID NO: 17332 - RNA, 20 nt, synthetic construct
  source 1..20: mol_type = other RNA
ccccacagcctcccagacaa

SEQ ID NO: 17333 - RNA, 20 nt, synthetic construct
  source 1..20: mol_type = other RNA
ccccatcaagaggtggattg

SEQ ID NO: 17334 - RNA, 20 nt, synthetic construct
  source 1..20: mol_type = other RNA
ccccatggatggtctagtca

SEQ ID NO: 17335 - RNA, 20 nt, synthetic construct
  source 1..20: mol_type = other RNA
cccctctctgactttgtacc

SEQ ID NO: 17336 - RNA, 20 nt, synthetic construct
  source 1..20: mol_type = other RNA
cccgataaaatacaacaggg

SEQ ID NO: 17337 - RNA, 20 nt, synthetic construct
  source 1..20: mol_type = other RNA
ccctatcattaaggaaaggc

SEQ ID NO: 17338 - RNA, 20 nt, synthetic construct
  source 1..20: mol_type = other RNA
ccctcaaacagagagttcca

SEQ ID NO: 17339 - RNA, 20 nt, synthetic construct
  source 1..20: mol_type = other RNA
ccctctctgactttgtacct

SEQ ID NO: 17340 - RNA, 20 nt, synthetic construct
  source 1..20: mol_type = other RNA
ccctgaatataagtgtattt

SEQ ID NO: 17341 - RNA, 20 nt, synthetic construct
  source 1..20: mol_type = other RNA
ccctgaggcatttaatatgt

SEQ ID NO: 17342 - RNA, 20 nt, synthetic construct
  source 1..20: mol_type = other RNA
ccctgttgtattttatcggg

SEQ ID NO: 17343 - RNA, 20 nt, synthetic construct
  source 1..20: mol_type = other RNA
ccgataaaatacaacaggga

SEQ ID NO: 17344 - RNA, 20 nt, synthetic construct
  source 1..20: mol_type = other RNA
ccgccttccctcaaacagag

SEQ ID NO: 17345 - RNA, 20 nt, synthetic construct
  source 1..20: mol_type = other RNA
cctaaatgcatacaagagct

SEQ ID NO: 17346 - RNA, 20 nt, synthetic construct
  source 1..20: mol_type = other RNA
cctaatgtttcagaaacagt

SEQ ID NO: 17347 - RNA, 20 nt, synthetic construct
  source 1..20: mol_type = other RNA
cctaatttcatgagctaaaa

SEQ ID NO: 17348 - RNA, 20 nt, synthetic construct
  source 1..20: mol_type = other RNA
cctatcattaaggaaaggct

SEQ ID NO: 17349 - RNA, 20 nt, synthetic construct
  source 1..20: mol_type = other RNA
cctatccctgttgtatttta

SEQ ID NO: 17350 - RNA, 20 nt, synthetic construct
  source 1..20: mol_type = other RNA
cctcaaacagagagttccag

SEQ ID NO: 17351 - RNA, 20 nt, synthetic construct
  source 1..20: mol_type = other RNA
cctcacctatccctgttgta

SEQ ID NO: 17352 - RNA, 20 nt, synthetic construct
  source 1..20: mol_type = other RNA
cctcagggatcagagcacag

SEQ ID NO: 17353 - RNA, 20 nt, synthetic construct
  source 1..20: mol_type = other RNA
cctcccagacaaggaggagt

SEQ ID NO: 17354 - RNA, 20 nt, synthetic construct
  source 1..20: mol_type = other RNA
cctccttctccccacagcct

SEQ ID NO: 17355 - RNA, 20 nt, synthetic construct
  source 1..20: mol_type = other RNA
cctccttgtctgggaggctg

SEQ ID NO: 17356 - RNA, 20 nt, synthetic construct
  source 1..20: mol_type = other RNA
cctctcattttggaaagtac

SEQ ID NO: 17357 - RNA, 20 nt, synthetic construct
  source 1..20: mol_type = other RNA
cctctctgactttgtaccta

SEQ ID NO: 17358 - RNA, 20 nt, synthetic construct
  source 1..20: mol_type = other RNA
cctcttcttagaaaagatta

SEQ ID NO: 17359 - RNA, 20 nt, synthetic construct
  source 1..20: mol_type = other RNA
cctcttgatggggctagtag

SEQ ID NO: 17360 - RNA, 20 nt, synthetic construct
  source 1..20: mol_type = other RNA
cctgaatataagtgtattta

SEQ ID NO: 17361 - RNA, 20 nt, synthetic construct
  source 1..20: mol_type = other RNA
cctgaggcatttaatatgtt

SEQ ID NO: 17362 - RNA, 20 nt, synthetic construct
  source 1..20: mol_type = other RNA
cctgcctggaactctctgtt

SEQ ID NO: 17363 - RNA, 20 nt, synthetic construct
  source 1..20: mol_type = other RNA
cctggaactctctgtttgag

SEQ ID NO: 17364 - RNA, 20 nt, synthetic construct
  source 1..20: mol_type = other RNA
cctggctagtttacagcaat

SEQ ID NO: 17365 - RNA, 20 nt, synthetic construct
  source 1..20: mol_type = other RNA
cctggtactcctccttctcc

SEQ ID NO: 17366 - RNA, 20 nt, synthetic construct
  source 1..20: mol_type = other RNA
cctgtctgatacttgtcctc

SEQ ID NO: 17367 - RNA, 20 nt, synthetic construct
  source 1..20: mol_type = other RNA
cctgtggatgctaattaaaa

SEQ ID NO: 17368 - RNA, 20 nt, synthetic construct
  source 1..20: mol_type = other RNA
cctgtgtgtgggttttgttt

SEQ ID NO: 17369 - RNA, 20 nt, synthetic construct
  source 1..20: mol_type = other RNA
cctgttgtattttatcgggt

SEQ ID NO: 17370 - RNA, 20 nt, synthetic construct
  source 1..20: mol_type = other RNA
ccttaaatggttgagttgga

SEQ ID NO: 17371 - RNA, 20 nt, synthetic construct
  source 1..20: mol_type = other RNA
ccttaatgatagggtgtttc

SEQ ID NO: 17372 - RNA, 20 nt, synthetic construct
  source 1..20: mol_type = other RNA
ccttccctcaaacagagagt

SEQ ID NO: 17373 - RNA, 20 nt, synthetic construct
  source 1..20: mol_type = other RNA
ccttctccccacagcctccc

SEQ ID NO: 17374 - RNA, 20 nt, synthetic construct
  source 1..20: mol_type = other RNA
ccttgaccagatatatctct

SEQ ID NO: 17375 - RNA, 20 nt, synthetic construct
  source 1..20: mol_type = other RNA
ccttgtctgggaggctgtgg

SEQ ID NO: 17376 - RNA, 20 nt, synthetic construct
  source 1..20: mol_type = other RNA
cctttccttaatgatagggt

SEQ ID NO: 17377 - RNA, 20 nt, synthetic construct
  source 1..20: mol_type = other RNA
ccttttagtgatcatgtacc

SEQ ID NO: 17378 - RNA, 20 nt, synthetic construct
  source 1..20: mol_type = other RNA
cgataaaatacaacagggat

SEQ ID NO: 17379 - RNA, 20 nt, synthetic construct
  source 1..20: mol_type = other RNA
cgcaaatcccactgtcacat

SEQ ID NO: 17380 - RNA, 20 nt, synthetic construct
  source 1..20: mol_type = other RNA
cgccttccctcaaacagaga

SEQ ID NO: 17381 - RNA, 20 nt, synthetic construct
  source 1..20: mol_type = other RNA
cggcaagattttgtgagagc

SEQ ID NO: 17382 - RNA, 20 nt, synthetic construct
  source 1..20: mol_type = other RNA
cgggtccaactcaaccattt

SEQ ID NO: 17383 - RNA, 20 nt, synthetic construct
  source 1..20: mol_type = other RNA
cgttttaattagcatccaca

SEQ ID NO: 17384 - RNA, 20 nt, synthetic construct
  source 1..20: mol_type = other RNA
ctaaaaggcagctactcctc

SEQ ID NO: 17385 - RNA, 20 nt, synthetic construct
  source 1..20: mol_type = other RNA
ctaaatatacagattgacac

SEQ ID NO: 17386 - RNA, 20 nt, synthetic construct
  source 1..20: mol_type = other RNA
ctaaatgcatacaagagctg

SEQ ID NO: 17387 - RNA, 20 nt, synthetic construct
  source 1..20: mol_type = other RNA
ctaacacttctcttcatttt

SEQ ID NO: 17388 - RNA, 20 nt, synthetic construct
  source 1..20: mol_type = other RNA
ctaagaagaggacaagtatc

SEQ ID NO: 17389 - RNA, 20 nt, synthetic construct
  source 1..20: mol_type = other RNA
ctaagagagctctttgcatc

SEQ ID NO: 17390 - RNA, 20 nt, synthetic construct
  source 1..20: mol_type = other RNA
ctaatgaagacctgattttt

SEQ ID NO: 17391 - RNA, 20 nt, synthetic construct
  source 1..20: mol_type = other RNA
ctaatgtttcagaaacagta

SEQ ID NO: 17392 - RNA, 20 nt, synthetic construct
  source 1..20: mol_type = other RNA
ctaattaaaacgcaaatccc

SEQ ID NO: 17393 - RNA, 20 nt, synthetic construct
  source 1..20: mol_type = other RNA
ctaatttcatgagctaaaaa

SEQ ID NO: 17394 - RNA, 20 nt, synthetic construct
  source 1..20: mol_type = other RNA
ctactaaatatacagattga

SEQ ID NO: 17395 - RNA, 20 nt, synthetic construct
  source 1..20: mol_type = other RNA
ctactagccccatcaagagg

SEQ ID NO: 17396 - RNA, 20 nt, synthetic construct
  source 1..20: mol_type = other RNA
ctactcctccttgtctggga

SEQ ID NO: 17397 - RNA, 20 nt, synthetic construct
  source 1..20: mol_type = other RNA
ctagaaacaccctatcatta

SEQ ID NO: 17398 - RNA, 20 nt, synthetic construct
  source 1..20: mol_type = other RNA
ctagaccatccatggggaag

SEQ ID NO: 17399 - RNA, 20 nt, synthetic construct
  source 1..20: mol_type = other RNA
ctagagagatatatctggtc

SEQ ID NO: 17400 - RNA, 20 nt, synthetic construct
  source 1..20: mol_type = other RNA
ctagccaggttgggaatata

SEQ ID NO: 17401 - RNA, 20 nt, synthetic construct
  source 1..20: mol_type = other RNA
ctagccccatcaagaggtgg

SEQ ID NO: 17402 - RNA, 20 nt, synthetic construct
  source 1..20: mol_type = other RNA
ctagtagcctttccttaatg

SEQ ID NO: 17403 - RNA, 20 nt, synthetic construct
  source 1..20: mol_type = other RNA
ctagtcatgcctctcatttt

SEQ ID NO: 17404 - RNA, 20 nt, synthetic construct
  source 1..20: mol_type = other RNA
ctagtttacagcaatcacct

SEQ ID NO: 17405 - RNA, 20 nt, synthetic construct
  source 1..20: mol_type = other RNA
ctatcattaaggaaaggcta

SEQ ID NO: 17406 - RNA, 20 nt, synthetic construct
  source 1..20: mol_type = other RNA
ctatccctgttgtattttat

SEQ ID NO: 17407 - RNA, 20 nt, synthetic construct
  source 1..20: mol_type = other RNA
ctatggcaaatgggacagaa

SEQ ID NO: 17408 - RNA, 20 nt, synthetic construct
  source 1..20: mol_type = other RNA
ctcaaacagagagttccagg

SEQ ID NO: 17409 - RNA, 20 nt, synthetic construct
  source 1..20: mol_type = other RNA
ctcaaccagttactggcttt

SEQ ID NO: 17410 - RNA, 20 nt, synthetic construct
  source 1..20: mol_type = other RNA
ctcaaccatttaaggtattt

SEQ ID NO: 17411 - RNA, 20 nt, synthetic construct
  source 1..20: mol_type = other RNA
ctcacaaaatcttgccgcct

SEQ ID NO: 17412 - RNA, 20 nt, synthetic construct
  source 1..20: mol_type = other RNA
ctcacctatccctgttgtat

SEQ ID NO: 17413 - RNA, 20 nt, synthetic construct
  source 1..20: mol_type = other RNA
ctcagatgcaaagagctctc

SEQ ID NO: 17414 - RNA, 20 nt, synthetic construct
  source 1..20: mol_type = other RNA
ctcagggatcagagcacaga

SEQ ID NO: 17415 - RNA, 20 nt, synthetic construct
  source 1..20: mol_type = other RNA
ctcatgaaattaggtacaaa

SEQ ID NO: 17416 - RNA, 20 nt, synthetic construct
  source 1..20: mol_type = other RNA
ctcattttggaaagtactgt

SEQ ID NO: 17417 - RNA, 20 nt, synthetic construct
  source 1..20: mol_type = other RNA
ctccaaaagtcataaagcca

SEQ ID NO: 17418 - RNA, 20 nt, synthetic construct
  source 1..20: mol_type = other RNA
ctccatttgatcataatgga

SEQ ID NO: 17419 - RNA, 20 nt, synthetic construct
  source 1..20: mol_type = other RNA
ctcccagacaaggaggagta

SEQ ID NO: 17420 - RNA, 20 nt, synthetic construct
  source 1..20: mol_type = other RNA
ctccccacagcctcccagac

SEQ ID NO: 17421 - RNA, 20 nt, synthetic construct
  source 1..20: mol_type = other RNA
ctcctccttctccccacagc

SEQ ID NO: 17422 - RNA, 20 nt, synthetic construct
  source 1..20: mol_type = other RNA
ctcctccttgtctgggaggc

SEQ ID NO: 17423 - RNA, 20 nt, synthetic construct
  source 1..20: mol_type = other RNA
ctccttctccccacagcctc

SEQ ID NO: 17424 - RNA, 20 nt, synthetic construct
  source 1..20: mol_type = other RNA
ctccttgtctgggaggctgt

SEQ ID NO: 17425 - RNA, 20 nt, synthetic construct
  source 1..20: mol_type = other RNA
ctctagaaacaccctatcat

SEQ ID NO: 17426 - RNA, 20 nt, synthetic construct
  source 1..20: mol_type = other RNA
ctctcacaaaatcttgccgc

SEQ ID NO: 17427 - RNA, 20 nt, synthetic construct
  source 1..20: mol_type = other RNA
ctctcattttggaaagtact

SEQ ID NO: 17428 - RNA, 20 nt, synthetic construct
  source 1..20: mol_type = other RNA
ctctccaaaagtcataaagc

SEQ ID NO: 17429 - RNA, 20 nt, synthetic construct
  source 1..20: mol_type = other RNA
ctctctagaaacaccctatc

SEQ ID NO: 17430 - RNA, 20 nt, synthetic construct
  source 1..20: mol_type = other RNA
ctctctgactttgtacctaa

SEQ ID NO: 17431 - RNA, 20 nt, synthetic construct
  source 1..20: mol_type = other RNA
ctctctgtttgagggaaggc

SEQ ID NO: 17432 - RNA, 20 nt, synthetic construct
  source 1..20: mol_type = other RNA
ctctcttagcttttaatgtt

SEQ ID NO: 17433 - RNA, 20 nt, synthetic construct
  source 1..20: mol_type = other RNA
ctctgactttgtacctaatt

SEQ ID NO: 17434 - RNA, 20 nt, synthetic construct
  source 1..20: mol_type = other RNA
ctctgatccctgaggcattt

SEQ ID NO: 17435 - RNA, 20 nt, synthetic construct
  source 1..20: mol_type = other RNA
ctctgtttgagggaaggcgg

SEQ ID NO: 17436 - RNA, 20 nt, synthetic construct
  source 1..20: mol_type = other RNA
ctcttagcttttaatgttat

SEQ ID NO: 17437 - RNA, 20 nt, synthetic construct
  source 1..20: mol_type = other RNA
ctcttcattttcaatgaaaa

SEQ ID NO: 17438 - RNA, 20 nt, synthetic construct
  source 1..20: mol_type = other RNA
ctcttcttagaaaagattac

SEQ ID NO: 17439 - RNA, 20 nt, synthetic construct
  source 1..20: mol_type = other RNA
ctcttgatggggctagtagc

SEQ ID NO: 17440 - RNA, 20 nt, synthetic construct
  source 1..20: mol_type = other RNA
ctcttgtatgcatttaggtt

SEQ ID NO: 17441 - RNA, 20 nt, synthetic construct
  source 1..20: mol_type = other RNA
ctctttgcatctgagcttct

SEQ ID NO: 17442 - RNA, 20 nt, synthetic construct
  source 1..20: mol_type = other RNA
ctgaaaaattaatttatgcc

SEQ ID NO: 17443 - RNA, 20 nt, synthetic construct
  source 1..20: mol_type = other RNA
ctgaaacattaggcaatata

SEQ ID NO: 17444 - RNA, 20 nt, synthetic construct
  source 1..20: mol_type = other RNA
ctgacctgtgtgtgggtttt

SEQ ID NO: 17445 - RNA, 20 nt, synthetic construct
  source 1..20: mol_type = other RNA
ctgactttgtacctaatttc

SEQ ID NO: 17446 - RNA, 20 nt, synthetic construct
  source 1..20: mol_type = other RNA
ctgagcttctaataataaga

SEQ ID NO: 17447 - RNA, 20 nt, synthetic construct
  source 1..20: mol_type = other RNA
ctgaggcatttaatatgttc

SEQ ID NO: 17448 - RNA, 20 nt, synthetic construct
  source 1..20: mol_type = other RNA
ctgatacttgtcctcttctt

SEQ ID NO: 17449 - RNA, 20 nt, synthetic construct
  source 1..20: mol_type = other RNA
ctgatccctgaggcatttaa

SEQ ID NO: 17450 - RNA, 20 nt, synthetic construct
  source 1..20: mol_type = other RNA
ctgcctggaactctctgttt

SEQ ID NO: 17451 - RNA, 20 nt, synthetic construct
  source 1..20: mol_type = other RNA
ctgccttttagtgatcatgt

SEQ ID NO: 17452 - RNA, 20 nt, synthetic construct
  source 1..20: mol_type = other RNA
ctggaactctctgtttgagg

SEQ ID NO: 17453 - RNA, 20 nt, synthetic construct
  source 1..20: mol_type = other RNA
ctggcaaataccttaaatgg

SEQ ID NO: 17454 - RNA, 20 nt, synthetic construct
  source 1..20: mol_type = other RNA
ctggctagtttacagcaatc

SEQ ID NO: 17455 - RNA, 20 nt, synthetic construct
  source 1..20: mol_type = other RNA
ctggctttatgacttttgga

SEQ ID NO: 17456 - RNA, 20 nt, synthetic construct
  source 1..20: mol_type = other RNA
ctgggaggctgtggggagaa

SEQ ID NO: 17457 - RNA, 20 nt, synthetic construct
  source 1..20: mol_type = other RNA
ctgggtttgaatttgggctc

SEQ ID NO: 17458 - RNA, 20 nt, synthetic construct
  source 1..20: mol_type = other RNA
ctggtactcctccttctccc

SEQ ID NO: 17459 - RNA, 20 nt, synthetic construct
  source 1..20: mol_type = other RNA
ctggtcaaggtggcctggta

SEQ ID NO: 17460 - RNA, 20 nt, synthetic construct
  source 1..20: mol_type = other RNA
ctggttgagcccaaattcaa

SEQ ID NO: 17461 - RNA, 20 nt, synthetic construct
  source 1..20: mol_type = other RNA
ctgtaaactagccaggttgg

SEQ ID NO: 17462 - RNA, 20 nt, synthetic construct
  source 1..20: mol_type = other RNA
ctgtaatcttttctaagaag

SEQ ID NO: 17463 - RNA, 20 nt, synthetic construct
  source 1..20: mol_type = other RNA
ctgtatatttagtagcacta

SEQ ID NO: 17464 - RNA, 20 nt, synthetic construct
  source 1..20: mol_type = other RNA
ctgtcacatgcattactcca

SEQ ID NO: 17465 - RNA, 20 nt, synthetic construct
  source 1..20: mol_type = other RNA
ctgtcccatttgccatagtc

SEQ ID NO: 17466 - RNA, 20 nt, synthetic construct
  source 1..20: mol_type = other RNA
ctgtctgatacttgtcctct

SEQ ID NO: 17467 - RNA, 20 nt, synthetic construct
  source 1..20: mol_type = other RNA
ctgtgctctgatccctgagg

SEQ ID NO: 17468 - RNA, 20 nt, synthetic construct
  source 1..20: mol_type = other RNA
ctgtggatgctaattaaaac

SEQ ID NO: 17469 - RNA, 20 nt, synthetic construct
  source 1..20: mol_type = other RNA
ctgtgggcataaattaattt

SEQ ID NO: 17470 - RNA, 20 nt, synthetic construct
  source 1..20: mol_type = other RNA
ctgtggggagaaggaggagt

SEQ ID NO: 17471 - RNA, 20 nt, synthetic construct
  source 1..20: mol_type = other RNA
ctgtgtgtgggttttgtttt

SEQ ID NO: 17472 - RNA, 20 nt, synthetic construct
  source 1..20: mol_type = other RNA
ctgttgtattttatcgggtc

SEQ ID NO: 17473 - RNA, 20 nt, synthetic construct
  source 1..20: mol_type = other RNA
ctgtttctgaaacattaggc

SEQ ID NO: 17474 - RNA, 20 nt, synthetic construct
  source 1..20: mol_type = other RNA
ctgtttgagggaaggcggca

SEQ ID NO: 17475 - RNA, 20 nt, synthetic construct
  source 1..20: mol_type = other RNA
cttaaataactctccaaaag

SEQ ID NO: 17476 - RNA, 20 nt, synthetic construct
  source 1..20: mol_type = other RNA
cttaaatggttgagttggac

SEQ ID NO: 17477 - RNA, 20 nt, synthetic construct
  source 1..20: mol_type = other RNA
cttaatgatagggtgtttct

SEQ ID NO: 17478 - RNA, 20 nt, synthetic construct
  source 1..20: mol_type = other RNA
cttagaaaagattacagtga

SEQ ID NO: 17479 - RNA, 20 nt, synthetic construct
  source 1..20: mol_type = other RNA
cttagcttttaatgttatga

SEQ ID NO: 17480 - RNA, 20 nt, synthetic construct
  source 1..20: mol_type = other RNA
cttatattcagggtacatga

SEQ ID NO: 17481 - RNA, 20 nt, synthetic construct
  source 1..20: mol_type = other RNA
cttattattagaagctcaga

SEQ ID NO: 17482 - RNA, 20 nt, synthetic construct
  source 1..20: mol_type = other RNA
cttcattagattccccaatc

SEQ ID NO: 17483 - RNA, 20 nt, synthetic construct
  source 1..20: mol_type = other RNA
cttccaaaacttaactgaaa

SEQ ID NO: 17484 - RNA, 20 nt, synthetic construct
  source 1..20: mol_type = other RNA
cttcccacttccccatggat

SEQ ID NO: 17485 - RNA, 20 nt, synthetic construct
  source 1..20: mol_type = other RNA
cttccccatggatggtctag

SEQ ID NO: 17486 - RNA, 20 nt, synthetic construct
  source 1..20: mol_type = other RNA
cttccctcaaacagagagtt

SEQ ID NO: 17487 - RNA, 20 nt, synthetic construct
  source 1..20: mol_type = other RNA
cttctccccacagcctccca

SEQ ID NO: 17488 - RNA, 20 nt, synthetic construct
  source 1..20: mol_type = other RNA
cttctcttcattttcaatga

SEQ ID NO: 17489 - RNA, 20 nt, synthetic construct
  source 1..20: mol_type = other RNA
cttcttagaaaagattacag

SEQ ID NO: 17490 - RNA, 20 nt, synthetic construct
  source 1..20: mol_type = other RNA
cttgaccagatatatctctc

SEQ ID NO: 17491 - RNA, 20 nt, synthetic construct
  source 1..20: mol_type = other RNA
cttgatggggctagtagcct

SEQ ID NO: 17492 - RNA, 20 nt, synthetic construct
  source 1..20: mol_type = other RNA
cttgccgccttccctcaaac

SEQ ID NO: 17493 - RNA, 20 nt, synthetic construct
  source 1..20: mol_type = other RNA
cttgtatgcatttaggtttt

SEQ ID NO: 17494 - RNA, 20 nt, synthetic construct
  source 1..20: mol_type = other RNA
cttgtcctcttcttagaaaa

SEQ ID NO: 17495 - RNA, 20 nt, synthetic construct
  source 1..20: mol_type = other RNA
cttgtctgggaggctgtggg

SEQ ID NO: 17496 - RNA, 20 nt, synthetic construct
  source 1..20: mol_type = other RNA
ctttatgacttttggagagt

SEQ ID NO: 17497 - RNA, 20 nt, synthetic construct
  source 1..20: mol_type = other RNA
ctttccaaaatgagaggcat

SEQ ID NO: 17498 - RNA, 20 nt, synthetic construct
  source 1..20: mol_type = other RNA
ctttccattatgatcaaatg

SEQ ID NO: 17499 - RNA, 20 nt, synthetic construct
  source 1..20: mol_type = other RNA
ctttccttaatgatagggtg

SEQ ID NO: 17500 - RNA, 20 nt, synthetic construct
  source 1..20: mol_type = other RNA
ctttgcatctgagcttctaa

SEQ ID NO: 17501 - RNA, 20 nt, synthetic construct
  source 1..20: mol_type = other RNA
ctttgtacctaatttcatga

SEQ ID NO: 17502 - RNA, 20 nt, synthetic construct
  source 1..20: mol_type = other RNA
ctttgttttttagctcatga

SEQ ID NO: 17503 - RNA, 20 nt, synthetic construct
  source 1..20: mol_type = other RNA
cttttagtgatcatgtaccc

SEQ ID NO: 17504 - RNA, 20 nt, synthetic construct
  source 1..20: mol_type = other RNA
cttttctaagaagaggacaa

SEQ ID NO: 17505 - RNA, 20 nt, synthetic construct
  source 1..20: mol_type = other RNA
cttttggagagttatttaag

SEQ ID NO: 17506 - RNA, 20 nt, synthetic construct
  source 1..20: mol_type = other RNA
gaaaaattaatttatgccca

SEQ ID NO: 17507 - RNA, 20 nt, synthetic construct
  source 1..20: mol_type = other RNA
gaaaagattacagtgatgct

SEQ ID NO: 17508 - RNA, 20 nt, synthetic construct
  source 1..20: mol_type = other RNA
gaaaatgaagagaagtgtta

SEQ ID NO: 17509 - RNA, 20 nt, synthetic construct
  source 1..20: mol_type = other RNA
gaaacaaaacctaaatgcat

SEQ ID NO: 17510 - RNA, 20 nt, synthetic construct
  source 1..20: mol_type = other RNA
gaaacaccctatcattaagg

SEQ ID NO: 17511 - RNA, 20 nt, synthetic construct
  source 1..20: mol_type = other RNA
gaaacagtactttccaaaat

SEQ ID NO: 17512 - RNA, 20 nt, synthetic construct
  source 1..20: mol_type = other RNA
gaaacattaggcaatatatt

SEQ ID NO: 17513 - RNA, 20 nt, synthetic construct
  source 1..20: mol_type = other RNA
gaaaggctactagccccatc

SEQ ID NO: 17514 - RNA, 20 nt, synthetic construct
  source 1..20: mol_type = other RNA
gaaagtactgtttctgaaac

SEQ ID NO: 17515 - RNA, 20 nt, synthetic construct
  source 1..20: mol_type = other RNA
gaaagtatgttctgtcccat

SEQ ID NO: 17516 - RNA, 20 nt, synthetic construct
  source 1..20: mol_type = other RNA
gaaattaggtacaaagtcag

SEQ ID NO: 17517 - RNA, 20 nt, synthetic construct
  source 1..20: mol_type = other RNA
gaacatactttccattatga

SEQ ID NO: 17518 - RNA, 20 nt, synthetic construct
  source 1..20: mol_type = other RNA
gaacatattaaatgcctcag

SEQ ID NO: 17519 - RNA, 20 nt, synthetic construct
  source 1..20: mol_type = other RNA
gaactctctgtttgagggaa

SEQ ID NO: 17520 - RNA, 20 nt, synthetic construct
  source 1..20: mol_type = other RNA
gaagagaagtgttagtgcta

SEQ ID NO: 17521 - RNA, 20 nt, synthetic construct
  source 1..20: mol_type = other RNA
gaagaggacaagtatcagac

SEQ ID NO: 17522 - RNA, 20 nt, synthetic construct
  source 1..20: mol_type = other RNA
gaagctcagatgcaaagagc

SEQ ID NO: 17523 - RNA, 20 nt, synthetic construct
  source 1..20: mol_type = other RNA
gaagcttaaataactctcca

SEQ ID NO: 17524 - RNA, 20 nt, synthetic construct
  source 1..20: mol_type = other RNA
gaaggaggagtaccaggcca

SEQ ID NO: 17525 - RNA, 20 nt, synthetic construct
  source 1..20: mol_type = other RNA
gaaggcggcaagattttgtg

SEQ ID NO: 17526 - RNA, 20 nt, synthetic construct
  source 1..20: mol_type = other RNA
gaagtgggaagaaaatatta

SEQ ID NO: 17527 - RNA, 20 nt, synthetic construct
  source 1..20: mol_type = other RNA
gaagtgttagtgctactaaa

SEQ ID NO: 17528 - RNA, 20 nt, synthetic construct
  source 1..20: mol_type = other RNA
gaatatattgcctaatgttt

SEQ ID NO: 17529 - RNA, 20 nt, synthetic construct
  source 1..20: mol_type = other RNA
gaatctaatgaagacctgat

SEQ ID NO: 17530 - RNA, 20 nt, synthetic construct
  source 1..20: mol_type = other RNA
gaatctgtgctctgatccct

SEQ ID NO: 17531 - RNA, 20 nt, synthetic construct
  source 1..20: mol_type = other RNA
gaatttgggctcaaccagtt

SEQ ID NO: 17532 - RNA, 20 nt, synthetic construct
  source 1..20: mol_type = other RNA
gacaaggaggagtagctgcc

SEQ ID NO: 17533 - RNA, 20 nt, synthetic construct
  source 1..20: mol_type = other RNA
gacaagtatcagacaggctg

SEQ ID NO: 17534 - RNA, 20 nt, synthetic construct
  source 1..20: mol_type = other RNA
gacactaaatatatgtgtat

SEQ ID NO: 17535 - RNA, 20 nt, synthetic construct
  source 1..20: mol_type = other RNA
gacagaacatactttccatt

SEQ ID NO: 17536 - RNA, 20 nt, synthetic construct
  source 1..20: mol_type = other RNA
gacaggctgggtttgaattt

SEQ ID NO: 17537 - RNA, 20 nt, synthetic construct
  source 1..20: mol_type = other RNA
gacagtgggatttgcgtttt

SEQ ID NO: 17538 - RNA, 20 nt, synthetic construct
  source 1..20: mol_type = other RNA
gaccagatatatctctctag

SEQ ID NO: 17539 - RNA, 20 nt, synthetic construct
  source 1..20: mol_type = other RNA
gaccatccatggggaagtgg

SEQ ID NO: 17540 - RNA, 20 nt, synthetic construct
  source 1..20: mol_type = other RNA
gacccctctctgactttgta

SEQ ID NO: 17541 - RNA, 20 nt, synthetic construct
  source 1..20: mol_type = other RNA
gacccgataaaatacaacag

SEQ ID NO: 17542 - RNA, 20 nt, synthetic construct
  source 1..20: mol_type = other RNA
gacctgtgtgtgggttttgt

SEQ ID NO: 17543 - RNA, 20 nt, synthetic construct
  source 1..20: mol_type = other RNA
gactagaccatccatgggga

SEQ ID NO: 17544 - RNA, 20 nt, synthetic construct
  source 1..20: mol_type = other RNA
gactatggcaaatgggacag

SEQ ID NO: 17545 - RNA, 20 nt, synthetic construct
  source 1..20: mol_type = other RNA
gactttgtacctaatttcat

SEQ ID NO: 17546 - RNA, 20 nt, synthetic construct
  source 1..20: mol_type = other RNA
gacttttggagagttattta

SEQ ID NO: 17547 - RNA, 20 nt, synthetic construct
  source 1..20: mol_type = other RNA
gagaaggaggagtaccaggc

SEQ ID NO: 17548 - RNA, 20 nt, synthetic construct
  source 1..20: mol_type = other RNA
gagaagtgttagtgctacta

SEQ ID NO: 17549 - RNA, 20 nt, synthetic construct
  source 1..20: mol_type = other RNA
gagagatatatctggtcaag

SEQ ID NO: 17550 - RNA, 20 nt, synthetic construct
  source 1..20: mol_type = other RNA
gagagcatcactgtaatctt

SEQ ID NO: 17551 - RNA, 20 nt, synthetic construct
  source 1..20: mol_type = other RNA
gagagctctttgcatctgag

SEQ ID NO: 17552 - RNA, 20 nt, synthetic construct
  source 1..20: mol_type = other RNA
gagaggcatgactagaccat

SEQ ID NO: 17553 - RNA, 20 nt, synthetic construct
  source 1..20: mol_type = other RNA
gagagttatttaagcttcca

SEQ ID NO: 17554 - RNA, 20 nt, synthetic construct
  source 1..20: mol_type = other RNA
gagagttccaggcaggatga

SEQ ID NO: 17555 - RNA, 20 nt, synthetic construct
  source 1..20: mol_type = other RNA
gagatatatctggtcaaggt

SEQ ID NO: 17556 - RNA, 20 nt, synthetic construct
  source 1..20: mol_type = other RNA
gagcacagattcatcctgcc

SEQ ID NO: 17557 - RNA, 20 nt, synthetic construct
  source 1..20: mol_type = other RNA
gagcatcactgtaatctttt

SEQ ID NO: 17558 - RNA, 20 nt, synthetic construct
  source 1..20: mol_type = other RNA
gagcccaaattcaaacccag

SEQ ID NO: 17559 - RNA, 20 nt, synthetic construct
  source 1..20: mol_type = other RNA
gagctaaaaaacaaagaaac

SEQ ID NO: 17560 - RNA, 20 nt, synthetic construct
  source 1..20: mol_type = other RNA
gagctctcttagcttttaat

SEQ ID NO: 17561 - RNA, 20 nt, synthetic construct
  source 1..20: mol_type = other RNA
gagctctttgcatctgagct

SEQ ID NO: 17562 - RNA, 20 nt, synthetic construct
  source 1..20: mol_type = other RNA
gagctggcaaataccttaaa

SEQ ID NO: 17563 - RNA, 20 nt, synthetic construct
  source 1..20: mol_type = other RNA
gagcttctaataataagaac

SEQ ID NO: 17564 - RNA, 20 nt, synthetic construct
  source 1..20: mol_type = other RNA
gaggacaagtatcagacagg

SEQ ID NO: 17565 - RNA, 20 nt, synthetic construct
  source 1..20: mol_type = other RNA
gaggactatggcaaatggga

SEQ ID NO: 17566 - RNA, 20 nt, synthetic construct
  source 1..20: mol_type = other RNA
gaggagtaccaggccacctt

SEQ ID NO: 17567 - RNA, 20 nt, synthetic construct
  source 1..20: mol_type = other RNA
gaggagtagctgccttttag

SEQ ID NO: 17568 - RNA, 20 nt, synthetic construct
  source 1..20: mol_type = other RNA
gaggcatgactagaccatcc

SEQ ID NO: 17569 - RNA, 20 nt, synthetic construct
  source 1..20: mol_type = other RNA
gaggcatttaatatgttctt

SEQ ID NO: 17570 - RNA, 20 nt, synthetic construct
  source 1..20: mol_type = other RNA
gaggctgtggggagaaggag

SEQ ID NO: 17571 - RNA, 20 nt, synthetic construct
  source 1..20: mol_type = other RNA
gagggaaggcggcaagattt

SEQ ID NO: 17572 - RNA, 20 nt, synthetic construct
  source 1..20: mol_type = other RNA
gaggtggattggggaatcta

SEQ ID NO: 17573 - RNA, 20 nt, synthetic construct
  source 1..20: mol_type = other RNA
gagtaatgcatgtgacagtg

SEQ ID NO: 17574 - RNA, 20 nt, synthetic construct
  source 1..20: mol_type = other RNA
gagtaccaggccaccttgac

SEQ ID NO: 17575 - RNA, 20 nt, synthetic construct
  source 1..20: mol_type = other RNA
gagtagctgccttttagtga

SEQ ID NO: 17576 - RNA, 20 nt, synthetic construct
  source 1..20: mol_type = other RNA
gagttatttaagcttccaaa

SEQ ID NO: 17577 - RNA, 20 nt, synthetic construct
  source 1..20: mol_type = other RNA
gagttccaggcaggatgaat

SEQ ID NO: 17578 - RNA, 20 nt, synthetic construct
  source 1..20: mol_type = other RNA
gagttggacccgataaaata

SEQ ID NO: 17579 - RNA, 20 nt, synthetic construct
  source 1..20: mol_type = other RNA
gataaaatacaacagggata

SEQ ID NO: 17580 - RNA, 20 nt, synthetic construct
  source 1..20: mol_type = other RNA
gatacttgtcctcttcttag

SEQ ID NO: 17581 - RNA, 20 nt, synthetic construct
  source 1..20: mol_type = other RNA
gatagggtgtttctagagag

SEQ ID NO: 17582 - RNA, 20 nt, synthetic construct
  source 1..20: mol_type = other RNA
gataggtgaggactatggca

SEQ ID NO: 17583 - RNA, 20 nt, synthetic construct
  source 1..20: mol_type = other RNA
gatatatctctctagaaaca

SEQ ID NO: 17584 - RNA, 20 nt, synthetic construct
  source 1..20: mol_type = other RNA
gatatatctggtcaaggtgg

SEQ ID NO: 17585 - RNA, 20 nt, synthetic construct
  source 1..20: mol_type = other RNA
gatcaaatggagtaatgcat

SEQ ID NO: 17586 - RNA, 20 nt, synthetic construct
  source 1..20: mol_type = other RNA
gatcactaaaaggcagctac

SEQ ID NO: 17587 - RNA, 20 nt, synthetic construct
  source 1..20: mol_type = other RNA
gatcagagcacagattcatc

SEQ ID NO: 17588 - RNA, 20 nt, synthetic construct
  source 1..20: mol_type = other RNA
gatcataatggaaagtatgt

SEQ ID NO: 17589 - RNA, 20 nt, synthetic construct
  source 1..20: mol_type = other RNA
gatcatgtaccctgaatata

SEQ ID NO: 17590 - RNA, 20 nt, synthetic construct
  source 1..20: mol_type = other RNA
gatccctgaggcatttaata

SEQ ID NO: 17591 - RNA, 20 nt, synthetic construct
  source 1..20: mol_type = other RNA
gatgaatctgtgctctgatc

SEQ ID NO: 17592 - RNA, 20 nt, synthetic construct
  source 1..20: mol_type = other RNA
gatgcaaagagctctcttag

SEQ ID NO: 17593 - RNA, 20 nt, synthetic construct
  source 1..20: mol_type = other RNA
gatgctaattaaaacgcaaa

SEQ ID NO: 17594 - RNA, 20 nt, synthetic construct
  source 1..20: mol_type = other RNA
gatgctctcacaaaatcttg

SEQ ID NO: 17595 - RNA, 20 nt, synthetic construct
  source 1..20: mol_type = other RNA
gatggggctagtagcctttc

SEQ ID NO: 17596 - RNA, 20 nt, synthetic construct
  source 1..20: mol_type = other RNA
gatggtctagtcatgcctct

SEQ ID NO: 17597 - RNA, 20 nt, synthetic construct
  source 1..20: mol_type = other RNA
gattacagtgatgctctcac

SEQ ID NO: 17598 - RNA, 20 nt, synthetic construct
  source 1..20: mol_type = other RNA
gattcatcctgcctggaact

SEQ ID NO: 17599 - RNA, 20 nt, synthetic construct
  source 1..20: mol_type = other RNA
gattccccaatccacctctt

SEQ ID NO: 17600 - RNA, 20 nt, synthetic construct
  source 1..20: mol_type = other RNA
gattgacactaaatatatgt

SEQ ID NO: 17601 - RNA, 20 nt, synthetic construct
  source 1..20: mol_type = other RNA
gattgctgtaaactagccag

SEQ ID NO: 17602 - RNA, 20 nt, synthetic construct
  source 1..20: mol_type = other RNA
gattggggaatctaatgaag

SEQ ID NO: 17603 - RNA, 20 nt, synthetic construct
  source 1..20: mol_type = other RNA
gatttgcgttttaattagca

SEQ ID NO: 17604 - RNA, 20 nt, synthetic construct
  source 1..20: mol_type = other RNA
gattttgtgagagcatcact

SEQ ID NO: 17605 - RNA, 20 nt, synthetic construct
  source 1..20: mol_type = other RNA
gcaaagagctctcttagctt

SEQ ID NO: 17606 - RNA, 20 nt, synthetic construct
  source 1..20: mol_type = other RNA
gcaaataccttaaatggttg

SEQ ID NO: 17607 - RNA, 20 nt, synthetic construct
  source 1..20: mol_type = other RNA
gcaaatcccactgtcacatg

SEQ ID NO: 17608 - RNA, 20 nt, synthetic construct
  source 1..20: mol_type = other RNA
gcaaatgggacagaacatac

SEQ ID NO: 17609 - RNA, 20 nt, synthetic construct
  source 1..20: mol_type = other RNA
gcaagattttgtgagagcat

SEQ ID NO: 17610 - RNA, 20 nt, synthetic construct
  source 1..20: mol_type = other RNA
gcaatatattcccaacctgg

SEQ ID NO: 17611 - RNA, 20 nt, synthetic construct
  source 1..20: mol_type = other RNA
gcaatcacctgtggatgcta

SEQ ID NO: 17612 - RNA, 20 nt, synthetic construct
  source 1..20: mol_type = other RNA
gcacagattcatcctgcctg

SEQ ID NO: 17613 - RNA, 20 nt, synthetic construct
  source 1..20: mol_type = other RNA
gcactaacacttctcttcat

SEQ ID NO: 17614 - RNA, 20 nt, synthetic construct
  source 1..20: mol_type = other RNA
gcagctactcctccttgtct

SEQ ID NO: 17615 - RNA, 20 nt, synthetic construct
  source 1..20: mol_type = other RNA
gcaggatgaatctgtgctct

SEQ ID NO: 17616 - RNA, 20 nt, synthetic construct
  source 1..20: mol_type = other RNA
gcatacaagagctggcaaat

SEQ ID NO: 17617 - RNA, 20 nt, synthetic construct
  source 1..20: mol_type = other RNA
gcatcactgtaatcttttct

SEQ ID NO: 17618 - RNA, 20 nt, synthetic construct
  source 1..20: mol_type = other RNA
gcatccacaggtgattgctg

SEQ ID NO: 17619 - RNA, 20 nt, synthetic construct
  source 1..20: mol_type = other RNA
gcatctgagcttctaataat

SEQ ID NO: 17620 - RNA, 20 nt, synthetic construct
  source 1..20: mol_type = other RNA
gcatgactagaccatccatg

SEQ ID NO: 17621 - RNA, 20 nt, synthetic construct
  source 1..20: mol_type = other RNA
gcatgtgacagtgggatttg

SEQ ID NO: 17622 - RNA, 20 nt, synthetic construct
  source 1..20: mol_type = other RNA
gcattactccatttgatcat

SEQ ID NO: 17623 - RNA, 20 nt, synthetic construct
  source 1..20: mol_type = other RNA
gcatttaggttttgtttctt

SEQ ID NO: 17624 - RNA, 20 nt, synthetic construct
  source 1..20: mol_type = other RNA
gccaccttgaccagatatat

SEQ ID NO: 17625 - RNA, 20 nt, synthetic construct
  source 1..20: mol_type = other RNA
gccagacccctctctgactt

SEQ ID NO: 17626 - RNA, 20 nt, synthetic construct
  source 1..20: mol_type = other RNA
gccagctcttgtatgcattt

SEQ ID NO: 17627 - RNA, 20 nt, synthetic construct
  source 1..20: mol_type = other RNA
gccaggttgggaatatattg

SEQ ID NO: 17628 - RNA, 20 nt, synthetic construct
  source 1..20: mol_type = other RNA
gccagtaactggttgagccc

SEQ ID NO: 17629 - RNA, 20 nt, synthetic construct
  source 1..20: mol_type = other RNA
gccatagtcctcacctatcc

SEQ ID NO: 17630 - RNA, 20 nt, synthetic construct
  source 1..20: mol_type = other RNA
gcccaaattcaaacccagcc

SEQ ID NO: 17631 - RNA, 20 nt, synthetic construct
  source 1..20: mol_type = other RNA
gcccacagtaaaacaaaaac

SEQ ID NO: 17632 - RNA, 20 nt, synthetic construct
  source 1..20: mol_type = other RNA
gccccatcaagaggtggatt

SEQ ID NO: 17633 - RNA, 20 nt, synthetic construct
  source 1..20: mol_type = other RNA
gccgccttccctcaaacaga

SEQ ID NO: 17634 - RNA, 20 nt, synthetic construct
  source 1..20: mol_type = other RNA
gcctaatgtttcagaaacag

SEQ ID NO: 17635 - RNA, 20 nt, synthetic construct
  source 1..20: mol_type = other RNA
gcctcagggatcagagcaca

SEQ ID NO: 17636 - RNA, 20 nt, synthetic construct
  source 1..20: mol_type = other RNA
gcctcccagacaaggaggag

SEQ ID NO: 17637 - RNA, 20 nt, synthetic construct
  source 1..20: mol_type = other RNA
gcctctcattttggaaagta

SEQ ID NO: 17638 - RNA, 20 nt, synthetic construct
  source 1..20: mol_type = other RNA
gcctggaactctctgtttga

SEQ ID NO: 17639 - RNA, 20 nt, synthetic construct
  source 1..20: mol_type = other RNA
gcctggtactcctccttctc

SEQ ID NO: 17640 - RNA, 20 nt, synthetic construct
  source 1..20: mol_type = other RNA
gcctgtctgatacttgtcct

SEQ ID NO: 17641 - RNA, 20 nt, synthetic construct
  source 1..20: mol_type = other RNA
gccttccctcaaacagagag

SEQ ID NO: 17642 - RNA, 20 nt, synthetic construct
  source 1..20: mol_type = other RNA
gcctttccttaatgataggg

SEQ ID NO: 17643 - RNA, 20 nt, synthetic construct
  source 1..20: mol_type = other RNA
gccttttagtgatcatgtac

SEQ ID NO: 17644 - RNA, 20 nt, synthetic construct
  source 1..20: mol_type = other RNA
gcggcaagattttgtgagag

SEQ ID NO: 17645 - RNA, 20 nt, synthetic construct
  source 1..20: mol_type = other RNA
gcgttttaattagcatccac

SEQ ID NO: 17646 - RNA, 20 nt, synthetic construct
  source 1..20: mol_type = other RNA
gctaaaaaacaaagaaacaa

SEQ ID NO: 17647 - RNA, 20 nt, synthetic construct
  source 1..20: mol_type = other RNA
gctaagagagctctttgcat

SEQ ID NO: 17648 - RNA, 20 nt, synthetic construct
  source 1..20: mol_type = other RNA
gctaattaaaacgcaaatcc

SEQ ID NO: 17649 - RNA, 20 nt, synthetic construct
  source 1..20: mol_type = other RNA
gctactaaatatacagattg

SEQ ID NO: 17650 - RNA, 20 nt, synthetic construct
  source 1..20: mol_type = other RNA
gctactagccccatcaagag

SEQ ID NO: 17651 - RNA, 20 nt, synthetic construct
  source 1..20: mol_type = other RNA
gctactcctccttgtctggg

SEQ ID NO: 17652 - RNA, 20 nt, synthetic construct
  source 1..20: mol_type = other RNA
gctagtagcctttccttaat

SEQ ID NO: 17653 - RNA, 20 nt, synthetic construct
  source 1..20: mol_type = other RNA
gctagtttacagcaatcacc

SEQ ID NO: 17654 - RNA, 20 nt, synthetic construct
  source 1..20: mol_type = other RNA
gctcaaccagttactggctt

SEQ ID NO: 17655 - RNA, 20 nt, synthetic construct
  source 1..20: mol_type = other RNA
gctcagatgcaaagagctct

SEQ ID NO: 17656 - RNA, 20 nt, synthetic construct
  source 1..20: mol_type = other RNA
gctcatgaaattaggtacaa

SEQ ID NO: 17657 - RNA, 20 nt, synthetic construct
  source 1..20: mol_type = other RNA
gctctcacaaaatcttgccg

SEQ ID NO: 17658 - RNA, 20 nt, synthetic construct
  source 1..20: mol_type = other RNA
gctctcttagcttttaatgt

SEQ ID NO: 17659 - RNA, 20 nt, synthetic construct
  source 1..20: mol_type = other RNA
gctctgatccctgaggcatt

SEQ ID NO: 17660 - RNA, 20 nt, synthetic construct
  source 1..20: mol_type = other RNA
gctcttgtatgcatttaggt

SEQ ID NO: 17661 - RNA, 20 nt, synthetic construct
  source 1..20: mol_type = other RNA
gctctttgcatctgagcttc

SEQ ID NO: 17662 - RNA, 20 nt, synthetic construct
  source 1..20: mol_type = other RNA
gctgccttttagtgatcatg

SEQ ID NO: 17663 - RNA, 20 nt, synthetic construct
  source 1..20: mol_type = other RNA
gctggcaaataccttaaatg

SEQ ID NO: 17664 - RNA, 20 nt, synthetic construct
  source 1..20: mol_type = other RNA
gctgggtttgaatttgggct

SEQ ID NO: 17665 - RNA, 20 nt, synthetic construct
  source 1..20: mol_type = other RNA
gctgtaaactagccaggttg

SEQ ID NO: 17666 - RNA, 20 nt, synthetic construct
  source 1..20: mol_type = other RNA
gctgtggggagaaggaggag

SEQ ID NO: 17667 - RNA, 20 nt, synthetic construct
  source 1..20: mol_type = other RNA
gcttaaataactctccaaaa

SEQ ID NO: 17668 - RNA, 20 nt, synthetic construct
  source 1..20: mol_type = other RNA
gcttccaaaacttaactgaa

SEQ ID NO: 17669 - RNA, 20 nt, synthetic construct
  source 1..20: mol_type = other RNA
gcttctaataataagaacat

SEQ ID NO: 17670 - RNA, 20 nt, synthetic construct
  source 1..20: mol_type = other RNA
gctttatgacttttggagag

SEQ ID NO: 17671 - RNA, 20 nt, synthetic construct
  source 1..20: mol_type = other RNA
ggaaaggctactagccccat

SEQ ID NO: 17672 - RNA, 20 nt, synthetic construct
  source 1..20: mol_type = other RNA
ggaaagtactgtttctgaaa

SEQ ID NO: 17673 - RNA, 20 nt, synthetic construct
  source 1..20: mol_type = other RNA
ggaaagtatgttctgtccca

SEQ ID NO: 17674 - RNA, 20 nt, synthetic construct
  source 1..20: mol_type = other RNA
ggaactctctgtttgaggga

SEQ ID NO: 17675 - RNA, 20 nt, synthetic construct
  source 1..20: mol_type = other RNA
ggaagcttaaataactctcc

SEQ ID NO: 17676 - RNA, 20 nt, synthetic construct
  source 1..20: mol_type = other RNA
ggaaggcggcaagattttgt

SEQ ID NO: 17677 - RNA, 20 nt, synthetic construct
  source 1..20: mol_type = other RNA
ggaagtgggaagaaaatatt

SEQ ID NO: 17678 - RNA, 20 nt, synthetic construct
  source 1..20: mol_type = other RNA
ggaatatattgcctaatgtt

SEQ ID NO: 17679 - RNA, 20 nt, synthetic construct
  source 1..20: mol_type = other RNA
ggaatctaatgaagacctga

SEQ ID NO: 17680 - RNA, 20 nt, synthetic construct
  source 1..20: mol_type = other RNA
ggacaagtatcagacaggct

SEQ ID NO: 17681 - RNA, 20 nt, synthetic construct
  source 1..20: mol_type = other RNA
ggacagaacatactttccat

SEQ ID NO: 17682 - RNA, 20 nt, synthetic construct
  source 1..20: mol_type = other RNA
ggacccgataaaatacaaca

SEQ ID NO: 17683 - RNA, 20 nt, synthetic construct
  source 1..20: mol_type = other RNA
ggactatggcaaatgggaca

SEQ ID NO: 17684 - RNA, 20 nt, synthetic construct
  source 1..20: mol_type = other RNA
ggagaaggaggagtaccagg

SEQ ID NO: 17685 - RNA, 20 nt, synthetic construct
  source 1..20: mol_type = other RNA
ggagagttatttaagcttcc

SEQ ID NO: 17686 - RNA, 20 nt, synthetic construct
  source 1..20: mol_type = other RNA
ggaggagtaccaggccacct

SEQ ID NO: 17687 - RNA, 20 nt, synthetic construct
  source 1..20: mol_type = other RNA
ggaggagtagctgcctttta

SEQ ID NO: 17688 - RNA, 20 nt, synthetic construct
  source 1..20: mol_type = other RNA
ggaggctgtggggagaagga

SEQ ID NO: 17689 - RNA, 20 nt, synthetic construct
  source 1..20: mol_type = other RNA
ggagtaatgcatgtgacagt

SEQ ID NO: 17690 - RNA, 20 nt, synthetic construct
  source 1..20: mol_type = other RNA
ggagtaccaggccaccttga

SEQ ID NO: 17691 - RNA, 20 nt, synthetic construct
  source 1..20: mol_type = other RNA
ggagtagctgccttttagtg

SEQ ID NO: 17692 - RNA, 20 nt, synthetic construct
  source 1..20: mol_type = other RNA
ggataggtgaggactatggc

SEQ ID NO: 17693 - RNA, 20 nt, synthetic construct
  source 1..20: mol_type = other RNA
ggatcagagcacagattcat

SEQ ID NO: 17694 - RNA, 20 nt, synthetic construct
  source 1..20: mol_type = other RNA
ggatgaatctgtgctctgat

SEQ ID NO: 17695 - RNA, 20 nt, synthetic construct
  source 1..20: mol_type = other RNA
ggatgctaattaaaacgcaa

SEQ ID NO: 17696 - RNA, 20 nt, synthetic construct
  source 1..20: mol_type = other RNA
ggatggtctagtcatgcctc

SEQ ID NO: 17697 - RNA, 20 nt, synthetic construct
  source 1..20: mol_type = other RNA
ggattggggaatctaatgaa

SEQ ID NO: 17698 - RNA, 20 nt, synthetic construct
  source 1..20: mol_type = other RNA
ggatttgcgttttaattagc

SEQ ID NO: 17699 - RNA, 20 nt, synthetic construct
  source 1..20: mol_type = other RNA
ggcaaataccttaaatggtt

SEQ ID NO: 17700 - RNA, 20 nt, synthetic construct
  source 1..20: mol_type = other RNA
ggcaaatgggacagaacata

SEQ ID NO: 17701 - RNA, 20 nt, synthetic construct
  source 1..20: mol_type = other RNA
ggcaagattttgtgagagca

SEQ ID NO: 17702 - RNA, 20 nt, synthetic construct
  source 1..20: mol_type = other RNA
ggcaatatattcccaacctg

SEQ ID NO: 17703 - RNA, 20 nt, synthetic construct
  source 1..20: mol_type = other RNA
ggcagctactcctccttgtc

SEQ ID NO: 17704 - RNA, 20 nt, synthetic construct
  source 1..20: mol_type = other RNA
ggcaggatgaatctgtgctc

SEQ ID NO: 17705 - RNA, 20 nt, synthetic construct
  source 1..20: mol_type = other RNA
ggcataaattaatttttcag

SEQ ID NO: 17706 - RNA, 20 nt, synthetic construct
  source 1..20: mol_type = other RNA
ggcatgactagaccatccat

SEQ ID NO: 17707 - RNA, 20 nt, synthetic construct
  source 1..20: mol_type = other RNA
ggcatttaatatgttcttat

SEQ ID NO: 17708 - RNA, 20 nt, synthetic construct
  source 1..20: mol_type = other RNA
ggccaccttgaccagatata

SEQ ID NO: 17709 - RNA, 20 nt, synthetic construct
  source 1..20: mol_type = other RNA
ggcctggtactcctccttct

SEQ ID NO: 17710 - RNA, 20 nt, synthetic construct
  source 1..20: mol_type = other RNA
ggcggcaagattttgtgaga

SEQ ID NO: 17711 - RNA, 20 nt, synthetic construct
  source 1..20: mol_type = other RNA
ggctactagccccatcaaga

SEQ ID NO: 17712 - RNA, 20 nt, synthetic construct
  source 1..20: mol_type = other RNA
ggctagtagcctttccttaa

SEQ ID NO: 17713 - RNA, 20 nt, synthetic construct
  source 1..20: mol_type = other RNA
ggctagtttacagcaatcac

SEQ ID NO: 17714 - RNA, 20 nt, synthetic construct
  source 1..20: mol_type = other RNA
ggctcaaccagttactggct

SEQ ID NO: 17715 - RNA, 20 nt, synthetic construct
  source 1..20: mol_type = other RNA
ggctgggtttgaatttgggc

SEQ ID NO: 17716 - RNA, 20 nt, synthetic construct
  source 1..20: mol_type = other RNA
ggctgtggggagaaggagga

SEQ ID NO: 17717 - RNA, 20 nt, synthetic construct
  source 1..20: mol_type = other RNA
ggctttatgacttttggaga

SEQ ID NO: 17718 - RNA, 20 nt, synthetic construct
  source 1..20: mol_type = other RNA
gggaagaaaatattataaac

SEQ ID NO: 17719 - RNA, 20 nt, synthetic construct
  source 1..20: mol_type = other RNA
gggaaggcggcaagattttg

SEQ ID NO: 17720 - RNA, 20 nt, synthetic construct
  source 1..20: mol_type = other RNA
gggaagtgggaagaaaatat

SEQ ID NO: 17721 - RNA, 20 nt, synthetic construct
  source 1..20: mol_type = other RNA
gggaatatattgcctaatgt

SEQ ID NO: 17722 - RNA, 20 nt, synthetic construct
  source 1..20: mol_type = other RNA
gggaatctaatgaagacctg

SEQ ID NO: 17723 - RNA, 20 nt, synthetic construct
  source 1..20: mol_type = other RNA
gggacagaacatactttcca

SEQ ID NO: 17724 - RNA, 20 nt, synthetic construct
  source 1..20: mol_type = other RNA
gggagaaggaggagtaccag

SEQ ID NO: 17725 - RNA, 20 nt, synthetic construct
  source 1..20: mol_type = other RNA
gggaggctgtggggagaagg

SEQ ID NO: 17726 - RNA, 20 nt, synthetic construct
  source 1..20: mol_type = other RNA
gggataggtgaggactatgg

SEQ ID NO: 17727 - RNA, 20 nt, synthetic construct
  source 1..20: mol_type = other RNA
gggatcagagcacagattca

SEQ ID NO: 17728 - RNA, 20 nt, synthetic construct
  source 1..20: mol_type = other RNA
gggatttgcgttttaattag

SEQ ID NO: 17729 - RNA, 20 nt, synthetic construct
  source 1..20: mol_type = other RNA
gggcataaattaatttttca

SEQ ID NO: 17730 - RNA, 20 nt, synthetic construct
  source 1..20: mol_type = other RNA
gggctagtagcctttcctta

SEQ ID NO: 17731 - RNA, 20 nt, synthetic construct
  source 1..20: mol_type = other RNA
gggctcaaccagttactggc

SEQ ID NO: 17732 - RNA, 20 nt, synthetic construct
  source 1..20: mol_type = other RNA
ggggaagtgggaagaaaata

SEQ ID NO: 17733 - RNA, 20 nt, synthetic construct
  source 1..20: mol_type = other RNA
ggggaatctaatgaagacct

SEQ ID NO: 17734 - RNA, 20 nt, synthetic construct
  source 1..20: mol_type = other RNA
ggggagaaggaggagtacca

SEQ ID NO: 17735 - RNA, 20 nt, synthetic construct
  source 1..20: mol_type = other RNA
ggggctagtagcctttcctt

SEQ ID NO: 17736 - RNA, 20 nt, synthetic construct
  source 1..20: mol_type = other RNA
gggtacatgatcactaaaag

SEQ ID NO: 17737 - RNA, 20 nt, synthetic construct
  source 1..20: mol_type = other RNA
gggtccaactcaaccattta

SEQ ID NO: 17738 - RNA, 20 nt, synthetic construct
  source 1..20: mol_type = other RNA
gggtgtttctagagagatat

SEQ ID NO: 17739 - RNA, 20 nt, synthetic construct
  source 1..20: mol_type = other RNA
gggtttgaatttgggctcaa

SEQ ID NO: 17740 - RNA, 20 nt, synthetic construct
  source 1..20: mol_type = other RNA
gggttttgtttttgttttac

SEQ ID NO: 17741 - RNA, 20 nt, synthetic construct
  source 1..20: mol_type = other RNA
ggtacaaagtcagagagggg

SEQ ID NO: 17742 - RNA, 20 nt, synthetic construct
  source 1..20: mol_type = other RNA
ggtacatgatcactaaaagg

SEQ ID NO: 17743 - RNA, 20 nt, synthetic construct
  source 1..20: mol_type = other RNA
ggtactcctccttctcccca

SEQ ID NO: 17744 - RNA, 20 nt, synthetic construct
  source 1..20: mol_type = other RNA
ggtatttgccagctcttgta

SEQ ID NO: 17745 - RNA, 20 nt, synthetic construct
  source 1..20: mol_type = other RNA
ggtcaaggtggcctggtact

SEQ ID NO: 17746 - RNA, 20 nt, synthetic construct
  source 1..20: mol_type = other RNA
ggtccaactcaaccatttaa

SEQ ID NO: 17747 - RNA, 20 nt, synthetic construct
  source 1..20: mol_type = other RNA
ggtctagtcatgcctctcat

SEQ ID NO: 17748 - RNA, 20 nt, synthetic construct
  source 1..20: mol_type = other RNA
ggtcttcattagattcccca

SEQ ID NO: 17749 - RNA, 20 nt, synthetic construct
  source 1..20: mol_type = other RNA
ggtgaggactatggcaaatg

SEQ ID NO: 17750 - RNA, 20 nt, synthetic construct
  source 1..20: mol_type = other RNA
ggtgattgctgtaaactagc

SEQ ID NO: 17751 - RNA, 20 nt, synthetic construct
  source 1..20: mol_type = other RNA
ggtggattggggaatctaat

SEQ ID NO: 17752 - RNA, 20 nt, synthetic construct
  source 1..20: mol_type = other RNA
ggtggcctggtactcctcct

SEQ ID NO: 17753 - RNA, 20 nt, synthetic construct
  source 1..20: mol_type = other RNA
ggtgtttctagagagatata

SEQ ID NO: 17754 - RNA, 20 nt, synthetic construct
  source 1..20: mol_type = other RNA
ggttgagcccaaattcaaac

SEQ ID NO: 17755 - RNA, 20 nt, synthetic construct
  source 1..20: mol_type = other RNA
ggttgagttggacccgataa

SEQ ID NO: 17756 - RNA, 20 nt, synthetic construct
  source 1..20: mol_type = other RNA
ggttgggaatatattgccta

SEQ ID NO: 17757 - RNA, 20 nt, synthetic construct
  source 1..20: mol_type = other RNA
ggtttgaatttgggctcaac

SEQ ID NO: 17758 - RNA, 20 nt, synthetic construct
  source 1..20: mol_type = other RNA
ggttttgtttctttgttttt

SEQ ID NO: 17759 - RNA, 20 nt, synthetic construct
  source 1..20: mol_type = other RNA
ggttttgtttttgttttact

SEQ ID NO: 17760 - RNA, 20 nt, synthetic construct
  source 1..20: mol_type = other RNA
gtaaaacaaaaacaaaaccc

SEQ ID NO: 17761 - RNA, 20 nt, synthetic construct
  source 1..20: mol_type = other RNA
gtaaactagccaggttggga

SEQ ID NO: 17762 - RNA, 20 nt, synthetic construct
  source 1..20: mol_type = other RNA
gtaactggttgagcccaaat

SEQ ID NO: 17763 - RNA, 20 nt, synthetic construct
  source 1..20: mol_type = other RNA
gtaatcttttctaagaagag

SEQ ID NO: 17764 - RNA, 20 nt, synthetic construct
  source 1..20: mol_type = other RNA
gtaatgcatgtgacagtggg

SEQ ID NO: 17765 - RNA, 20 nt, synthetic construct
  source 1..20: mol_type = other RNA
gtacaaagtcagagaggggt

SEQ ID NO: 17766 - RNA, 20 nt, synthetic construct
  source 1..20: mol_type = other RNA
gtacatgatcactaaaaggc

SEQ ID NO: 17767 - RNA, 20 nt, synthetic construct
  source 1..20: mol_type = other RNA
gtaccaggccaccttgacca

SEQ ID NO: 17768 - RNA, 20 nt, synthetic construct
  source 1..20: mol_type = other RNA
gtaccctgaatataagtgta

SEQ ID NO: 17769 - RNA, 20 nt, synthetic construct
  source 1..20: mol_type = other RNA
gtacctaatttcatgagcta

SEQ ID NO: 17770 - RNA, 20 nt, synthetic construct
  source 1..20: mol_type = other RNA
gtactcctccttctccccac

SEQ ID NO: 17771 - RNA, 20 nt, synthetic construct
  source 1..20: mol_type = other RNA
gtactgtttctgaaacatta

SEQ ID NO: 17772 - RNA, 20 nt, synthetic construct
  source 1..20: mol_type = other RNA
gtactttccaaaatgagagg

SEQ ID NO: 17773 - RNA, 20 nt, synthetic construct
  source 1..20: mol_type = other RNA
gtagcactaacacttctctt

SEQ ID NO: 17774 - RNA, 20 nt, synthetic construct
  source 1..20: mol_type = other RNA
gtagcctttccttaatgata

SEQ ID NO: 17775 - RNA, 20 nt, synthetic construct
  source 1..20: mol_type = other RNA
gtagctgccttttagtgatc

SEQ ID NO: 17776 - RNA, 20 nt, synthetic construct
  source 1..20: mol_type = other RNA
gtatatttagtagcactaac

SEQ ID NO: 17777 - RNA, 20 nt, synthetic construct
  source 1..20: mol_type = other RNA
gtatcagacaggctgggttt

SEQ ID NO: 17778 - RNA, 20 nt, synthetic construct
  source 1..20: mol_type = other RNA
gtatgcatttaggttttgtt

SEQ ID NO: 17779 - RNA, 20 nt, synthetic construct
  source 1..20: mol_type = other RNA
gtatgttctgtcccatttgc

SEQ ID NO: 17780 - RNA, 20 nt, synthetic construct
  source 1..20: mol_type = other RNA
gtatttgccagctcttgtat

SEQ ID NO: 17781 - RNA, 20 nt, synthetic construct
  source 1..20: mol_type = other RNA
gtattttatcgggtccaact

SEQ ID NO: 17782 - RNA, 20 nt, synthetic construct
  source 1..20: mol_type = other RNA
gtcaaggtggcctggtactc

SEQ ID NO: 17783 - RNA, 20 nt, synthetic construct
  source 1..20: mol_type = other RNA
gtcaatctgtatatttagta

SEQ ID NO: 17784 - RNA, 20 nt, synthetic construct
  source 1..20: mol_type = other RNA
gtcacatgcattactccatt

SEQ ID NO: 17785 - RNA, 20 nt, synthetic construct
  source 1..20: mol_type = other RNA
gtcataaagccagtaactgg

SEQ ID NO: 17786 - RNA, 20 nt, synthetic construct
  source 1..20: mol_type = other RNA
gtcatgcctctcattttgga

SEQ ID NO: 17787 - RNA, 20 nt, synthetic construct
  source 1..20: mol_type = other RNA
gtccaactcaaccatttaag

SEQ ID NO: 17788 - RNA, 20 nt, synthetic construct
  source 1..20: mol_type = other RNA
gtcccatttgccatagtcct

SEQ ID NO: 17789 - RNA, 20 nt, synthetic construct
  source 1..20: mol_type = other RNA
gtcctcacctatccctgttg

SEQ ID NO: 17790 - RNA, 20 nt, synthetic construct
  source 1..20: mol_type = other RNA
gtcctcttcttagaaaagat

SEQ ID NO: 17791 - RNA, 20 nt, synthetic construct
  source 1..20: mol_type = other RNA
gtctagtcatgcctctcatt

SEQ ID NO: 17792 - RNA, 20 nt, synthetic construct
  source 1..20: mol_type = other RNA
gtctgatacttgtcctcttc

SEQ ID NO: 17793 - RNA, 20 nt, synthetic construct
  source 1..20: mol_type = other RNA
gtctgggaggctgtggggag

SEQ ID NO: 17794 - RNA, 20 nt, synthetic construct
  source 1..20: mol_type = other RNA
gtcttcattagattccccaa

SEQ ID NO: 17795 - RNA, 20 nt, synthetic construct
  source 1..20: mol_type = other RNA
gtgacagtgggatttgcgtt

SEQ ID NO: 17796 - RNA, 20 nt, synthetic construct
  source 1..20: mol_type = other RNA
gtgagagcatcactgtaatc

SEQ ID NO: 17797 - RNA, 20 nt, synthetic construct
  source 1..20: mol_type = other RNA
gtgaggactatggcaaatgg

SEQ ID NO: 17798 - RNA, 20 nt, synthetic construct
  source 1..20: mol_type = other RNA
gtgatcatgtaccctgaata

SEQ ID NO: 17799 - RNA, 20 nt, synthetic construct
  source 1..20: mol_type = other RNA
gtgatgctctcacaaaatct

SEQ ID NO: 17800 - RNA, 20 nt, synthetic construct
  source 1..20: mol_type = other RNA
gtgattgctgtaaactagcc

SEQ ID NO: 17801 - RNA, 20 nt, synthetic construct
  source 1..20: mol_type = other RNA
gtgctactaaatatacagat

SEQ ID NO: 17802 - RNA, 20 nt, synthetic construct
  source 1..20: mol_type = other RNA
gtgctctgatccctgaggca

SEQ ID NO: 17803 - RNA, 20 nt, synthetic construct
  source 1..20: mol_type = other RNA
gtggatgctaattaaaacgc

SEQ ID NO: 17804 - RNA, 20 nt, synthetic construct
  source 1..20: mol_type = other RNA
gtggattggggaatctaatg

SEQ ID NO: 17805 - RNA, 20 nt, synthetic construct
  source 1..20: mol_type = other RNA
gtggcctggtactcctcctt

SEQ ID NO: 17806 - RNA, 20 nt, synthetic construct
  source 1..20: mol_type = other RNA
gtgggaagaaaatattataa

SEQ ID NO: 17807 - RNA, 20 nt, synthetic construct
  source 1..20: mol_type = other RNA
gtgggatttgcgttttaatt

SEQ ID NO: 17808 - RNA, 20 nt, synthetic construct
  source 1..20: mol_type = other RNA
gtgggcataaattaattttt

SEQ ID NO: 17809 - RNA, 20 nt, synthetic construct
  source 1..20: mol_type = other RNA
gtggggagaaggaggagtac

SEQ ID NO: 17810 - RNA, 20 nt, synthetic construct
  source 1..20: mol_type = other RNA
gtgggttttgtttttgtttt

SEQ ID NO: 17811 - RNA, 20 nt, synthetic construct
  source 1..20: mol_type = other RNA
gtgtcaatctgtatatttag

SEQ ID NO: 17812 - RNA, 20 nt, synthetic construct
  source 1..20: mol_type = other RNA
gtgtgggttttgtttttgtt

SEQ ID NO: 17813 - RNA, 20 nt, synthetic construct
  source 1..20: mol_type = other RNA
gtgtgtgggttttgtttttg

SEQ ID NO: 17814 - RNA, 20 nt, synthetic construct
  source 1..20: mol_type = other RNA
gtgttagtgctactaaatat

SEQ ID NO: 17815 - RNA, 20 nt, synthetic construct
  source 1..20: mol_type = other RNA
gtgtttctagagagatatat

SEQ ID NO: 17816 - RNA, 20 nt, synthetic construct
  source 1..20: mol_type = other RNA
gttaagttttggaagcttaa

SEQ ID NO: 17817 - RNA, 20 nt, synthetic construct
  source 1..20: mol_type = other RNA
gttactggctttatgacttt

SEQ ID NO: 17818 - RNA, 20 nt, synthetic construct
  source 1..20: mol_type = other RNA
gttagtgctactaaatatac

SEQ ID NO: 17819 - RNA, 20 nt, synthetic construct
  source 1..20: mol_type = other RNA
gttatttaagcttccaaaac

SEQ ID NO: 17820 - RNA, 20 nt, synthetic construct
  source 1..20: mol_type = other RNA
gttccaggcaggatgaatct

SEQ ID NO: 17821 - RNA, 20 nt, synthetic construct
  source 1..20: mol_type = other RNA
gttctgtcccatttgccata

SEQ ID NO: 17822 - RNA, 20 nt, synthetic construct
  source 1..20: mol_type = other RNA
gttcttattattagaagctc

SEQ ID NO: 17823 - RNA, 20 nt, synthetic construct
  source 1..20: mol_type = other RNA
gttgagcccaaattcaaacc

SEQ ID NO: 17824 - RNA, 20 nt, synthetic construct
  source 1..20: mol_type = other RNA
gttgagttggacccgataaa

SEQ ID NO: 17825 - RNA, 20 nt, synthetic construct
  source 1..20: mol_type = other RNA
gttggacccgataaaataca

SEQ ID NO: 17826 - RNA, 20 nt, synthetic construct
  source 1..20: mol_type = other RNA
gttgggaatatattgcctaa

SEQ ID NO: 17827 - RNA, 20 nt, synthetic construct
  source 1..20: mol_type = other RNA
gttgtattttatcgggtcca

SEQ ID NO: 17828 - RNA, 20 nt, synthetic construct
  source 1..20: mol_type = other RNA
gtttacagcaatcacctgtg

SEQ ID NO: 17829 - RNA, 20 nt, synthetic construct
  source 1..20: mol_type = other RNA
gtttataatattttcttccc

SEQ ID NO: 17830 - RNA, 20 nt, synthetic construct
  source 1..20: mol_type = other RNA
gtttcagaaacagtactttc

SEQ ID NO: 17831 - RNA, 20 nt, synthetic construct
  source 1..20: mol_type = other RNA
gtttctagagagatatatct

SEQ ID NO: 17832 - RNA, 20 nt, synthetic construct
  source 1..20: mol_type = other RNA
gtttctgaaacattaggcaa

SEQ ID NO: 17833 - RNA, 20 nt, synthetic construct
  source 1..20: mol_type = other RNA
gtttctttgttttttagctc

SEQ ID NO: 17834 - RNA, 20 nt, synthetic construct
  source 1..20: mol_type = other RNA
gtttgaatttgggctcaacc

SEQ ID NO: 17835 - RNA, 20 nt, synthetic construct
  source 1..20: mol_type = other RNA
gtttgagggaaggcggcaag

SEQ ID NO: 17836 - RNA, 20 nt, synthetic construct
  source 1..20: mol_type = other RNA
gttttaattagcatccacag

SEQ ID NO: 17837 - RNA, 20 nt, synthetic construct
  source 1..20: mol_type = other RNA
gttttactgtgggcataaat

SEQ ID NO: 17838 - RNA, 20 nt, synthetic construct
  source 1..20: mol_type = other RNA
gttttggaagcttaaataac

SEQ ID NO: 17839 - RNA, 20 nt, synthetic construct
  source 1..20: mol_type = other RNA
gttttgtttttgttttactg

SEQ ID NO: 17840 - RNA, 20 nt, synthetic construct
  source 1..20: mol_type = other RNA
gtttttgttttactgtgggc

SEQ ID NO: 17841 - RNA, 20 nt, synthetic construct
  source 1..20: mol_type = other RNA
gttttttagctcatgaaatt

SEQ ID NO: 17842 - RNA, 20 nt, synthetic construct
  source 1..20: mol_type = other RNA
taaaacaaaaacaaaaccca

SEQ ID NO: 17843 - RNA, 20 nt, synthetic construct
  source 1..20: mol_type = other RNA
taaaacgcaaatcccactgt

SEQ ID NO: 17844 - RNA, 20 nt, synthetic construct
  source 1..20: mol_type = other RNA
taaaagctaagagagctctt

SEQ ID NO: 17845 - RNA, 20 nt, synthetic construct
  source 1..20: mol_type = other RNA
taaaaggcagctactcctcc

SEQ ID NO: 17846 - RNA, 20 nt, synthetic construct
  source 1..20: mol_type = other RNA
taaaatacaacagggatagg

SEQ ID NO: 17847 - RNA, 20 nt, synthetic construct
  source 1..20: mol_type = other RNA
taaactagccaggttgggaa

SEQ ID NO: 17848 - RNA, 20 nt, synthetic construct
  source 1..20: mol_type = other RNA
taaagccagtaactggttga

SEQ ID NO: 17849 - RNA, 20 nt, synthetic construct
  source 1..20: mol_type = other RNA
taaataactctccaaaagtc

SEQ ID NO: 17850 - RNA, 20 nt, synthetic construct
  source 1..20: mol_type = other RNA
taaatacacttatattcagg

SEQ ID NO: 17851 - RNA, 20 nt, synthetic construct
  source 1..20: mol_type = other RNA
taaatatacagattgacact

SEQ ID NO: 17852 - RNA, 20 nt, synthetic construct
  source 1..20: mol_type = other RNA
taaatgcatacaagagctgg

SEQ ID NO: 17853 - RNA, 20 nt, synthetic construct
  source 1..20: mol_type = other RNA
taaatgcctcagggatcaga

SEQ ID NO: 17854 - RNA, 20 nt, synthetic construct
  source 1..20: mol_type = other RNA
taaatggttgagttggaccc

SEQ ID NO: 17855 - RNA, 20 nt, synthetic construct
  source 1..20: mol_type = other RNA
taacacttctcttcattttc

SEQ ID NO: 17856 - RNA, 20 nt, synthetic construct
  source 1..20: mol_type = other RNA
taacattaaaagctaagaga

SEQ ID NO: 17857 - RNA, 20 nt, synthetic construct
  source 1..20: mol_type = other RNA
taactctccaaaagtcataa

SEQ ID NO: 17858 - RNA, 20 nt, synthetic construct
  source 1..20: mol_type = other RNA
taactggttgagcccaaatt

SEQ ID NO: 17859 - RNA, 20 nt, synthetic construct
  source 1..20: mol_type = other RNA
taagaacatattaaatgcct

SEQ ID NO: 17860 - RNA, 20 nt, synthetic construct
  source 1..20: mol_type = other RNA
taagaagaggacaagtatca

SEQ ID NO: 17861 - RNA, 20 nt, synthetic construct
  source 1..20: mol_type = other RNA
taagagagctctttgcatct

SEQ ID NO: 17862 - RNA, 20 nt, synthetic construct
  source 1..20: mol_type = other RNA
taagcttccaaaacttaact

SEQ ID NO: 17863 - RNA, 20 nt, synthetic construct
  source 1..20: mol_type = other RNA
taaggaaaggctactagccc

SEQ ID NO: 17864 - RNA, 20 nt, synthetic construct
  source 1..20: mol_type = other RNA
taaggtatttgccagctctt

SEQ ID NO: 17865 - RNA, 20 nt, synthetic construct
  source 1..20: mol_type = other RNA
taagttttggaagcttaaat

SEQ ID NO: 17866 - RNA, 20 nt, synthetic construct
  source 1..20: mol_type = other RNA
taatattttcttcccacttc

SEQ ID NO: 17867 - RNA, 20 nt, synthetic construct
  source 1..20: mol_type = other RNA
taatcttttctaagaagagg

SEQ ID NO: 17868 - RNA, 20 nt, synthetic construct
  source 1..20: mol_type = other RNA
taatgaagacctgatttttt

SEQ ID NO: 17869 - RNA, 20 nt, synthetic construct
  source 1..20: mol_type = other RNA
taatgatagggtgtttctag

SEQ ID NO: 17870 - RNA, 20 nt, synthetic construct
  source 1..20: mol_type = other RNA
taatgcatgtgacagtggga

SEQ ID NO: 17871 - RNA, 20 nt, synthetic construct
  source 1..20: mol_type = other RNA
taatggaaagtatgttctgt

SEQ ID NO: 17872 - RNA, 20 nt, synthetic construct
  source 1..20: mol_type = other RNA
taatgtttcagaaacagtac

SEQ ID NO: 17873 - RNA, 20 nt, synthetic construct
  source 1..20: mol_type = other RNA
taattaaaacgcaaatccca

SEQ ID NO: 17874 - RNA, 20 nt, synthetic construct
  source 1..20: mol_type = other RNA
taattagcatccacaggtga

SEQ ID NO: 17875 - RNA, 20 nt, synthetic construct
  source 1..20: mol_type = other RNA
taatttatgcccacagtaaa

SEQ ID NO: 17876 - RNA, 20 nt, synthetic construct
  source 1..20: mol_type = other RNA
tacaaagtcagagaggggtc

SEQ ID NO: 17877 - RNA, 20 nt, synthetic construct
  source 1..20: mol_type = other RNA
tacaacagggataggtgagg

SEQ ID NO: 17878 - RNA, 20 nt, synthetic construct
  source 1..20: mol_type = other RNA
tacaagagctggcaaatacc

SEQ ID NO: 17879 - RNA, 20 nt, synthetic construct
  source 1..20: mol_type = other RNA
tacacatatatttagtgtca

SEQ ID NO: 17880 - RNA, 20 nt, synthetic construct
  source 1..20: mol_type = other RNA
tacacttatattcagggtac

SEQ ID NO: 17881 - RNA, 20 nt, synthetic construct
  source 1..20: mol_type = other RNA
tacagattgacactaaatat

SEQ ID NO: 17882 - RNA, 20 nt, synthetic construct
  source 1..20: mol_type = other RNA
tacagcaatcacctgtggat

SEQ ID NO: 17883 - RNA, 20 nt, synthetic construct
  source 1..20: mol_type = other RNA
tacagtgatgctctcacaaa

SEQ ID NO: 17884 - RNA, 20 nt, synthetic construct
  source 1..20: mol_type = other RNA
tacatgatcactaaaaggca

SEQ ID NO: 17885 - RNA, 20 nt, synthetic construct
  source 1..20: mol_type = other RNA
taccaggccaccttgaccag

SEQ ID NO: 17886 - RNA, 20 nt, synthetic construct
  source 1..20: mol_type = other RNA
taccctgaatataagtgtat

SEQ ID NO: 17887 - RNA, 20 nt, synthetic construct
  source 1..20: mol_type = other RNA
tacctaatttcatgagctaa

SEQ ID NO: 17888 - RNA, 20 nt, synthetic construct
  source 1..20: mol_type = other RNA
taccttaaatggttgagttg

SEQ ID NO: 17889 - RNA, 20 nt, synthetic construct
  source 1..20: mol_type = other RNA
tactaaatatacagattgac

SEQ ID NO: 17890 - RNA, 20 nt, synthetic construct
  source 1..20: mol_type = other RNA
tactagccccatcaagaggt

SEQ ID NO: 17891 - RNA, 20 nt, synthetic construct
  source 1..20: mol_type = other RNA
tactccatttgatcataatg

SEQ ID NO: 17892 - RNA, 20 nt, synthetic construct
  source 1..20: mol_type = other RNA
tactcctccttctccccaca

SEQ ID NO: 17893 - RNA, 20 nt, synthetic construct
  source 1..20: mol_type = other RNA
tactcctccttgtctgggag

SEQ ID NO: 17894 - RNA, 20 nt, synthetic construct
  source 1..20: mol_type = other RNA
tactggctttatgacttttg

SEQ ID NO: 17895 - RNA, 20 nt, synthetic construct
  source 1..20: mol_type = other RNA
tactgtgggcataaattaat

SEQ ID NO: 17896 - RNA, 20 nt, synthetic construct
  source 1..20: mol_type = other RNA
tactgtttctgaaacattag

SEQ ID NO: 17897 - RNA, 20 nt, synthetic construct
  source 1..20: mol_type = other RNA
tacttgtcctcttcttagaa

SEQ ID NO: 17898 - RNA, 20 nt, synthetic construct
  source 1..20: mol_type = other RNA
tactttccaaaatgagaggc

SEQ ID NO: 17899 - RNA, 20 nt, synthetic construct
  source 1..20: mol_type = other RNA
tactttccattatgatcaaa

SEQ ID NO: 17900 - RNA, 20 nt, synthetic construct
  source 1..20: mol_type = other RNA
tagaaaagattacagtgatg

SEQ ID NO: 17901 - RNA, 20 nt, synthetic construct
  source 1..20: mol_type = other RNA
tagaaacaccctatcattaa

SEQ ID NO: 17902 - RNA, 20 nt, synthetic construct
  source 1..20: mol_type = other RNA
tagaagctcagatgcaaaga

SEQ ID NO: 17903 - RNA, 20 nt, synthetic construct
  source 1..20: mol_type = other RNA
tagaccatccatggggaagt

SEQ ID NO: 17904 - RNA, 20 nt, synthetic construct
  source 1..20: mol_type = other RNA
tagagagatatatctggtca

SEQ ID NO: 17905 - RNA, 20 nt, synthetic construct
  source 1..20: mol_type = other RNA
tagattccccaatccacctc

SEQ ID NO: 17906 - RNA, 20 nt, synthetic construct
  source 1..20: mol_type = other RNA
tagcactaacacttctcttc

SEQ ID NO: 17907 - RNA, 20 nt, synthetic construct
  source 1..20: mol_type = other RNA
tagcatccacaggtgattgc

SEQ ID NO: 17908 - RNA, 20 nt, synthetic construct
  source 1..20: mol_type = other RNA
tagccaggttgggaatatat

SEQ ID NO: 17909 - RNA, 20 nt, synthetic construct
  source 1..20: mol_type = other RNA
tagccccatcaagaggtgga

SEQ ID NO: 17910 - RNA, 20 nt, synthetic construct
  source 1..20: mol_type = other RNA
tagcctttccttaatgatag

SEQ ID NO: 17911 - RNA, 20 nt, synthetic construct
  source 1..20: mol_type = other RNA
tagctcatgaaattaggtac

SEQ ID NO: 17912 - RNA, 20 nt, synthetic construct
  source 1..20: mol_type = other RNA
tagctgccttttagtgatca

SEQ ID NO: 17913 - RNA, 20 nt, synthetic construct
  source 1..20: mol_type = other RNA
taggcaatatattcccaacc

SEQ ID NO: 17914 - RNA, 20 nt, synthetic construct
  source 1..20: mol_type = other RNA
tagggtgtttctagagagat

SEQ ID NO: 17915 - RNA, 20 nt, synthetic construct
  source 1..20: mol_type = other RNA
taggtacaaagtcagagagg

SEQ ID NO: 17916 - RNA, 20 nt, synthetic construct
  source 1..20: mol_type = other RNA
taggtgaggactatggcaaa

SEQ ID NO: 17917 - RNA, 20 nt, synthetic construct
  source 1..20: mol_type = other RNA
taggttttgtttctttgttt

SEQ ID NO: 17918 - RNA, 20 nt, synthetic construct
  source 1..20: mol_type = other RNA
tagtagcactaacacttctc

SEQ ID NO: 17919 - RNA, 20 nt, synthetic construct
  source 1..20: mol_type = other RNA
tagtagcctttccttaatga

SEQ ID NO: 17920 - RNA, 20 nt, synthetic construct
  source 1..20: mol_type = other RNA
tagtcatgcctctcattttg

SEQ ID NO: 17921 - RNA, 20 nt, synthetic construct
  source 1..20: mol_type = other RNA
tagtcctcacctatccctgt

SEQ ID NO: 17922 - RNA, 20 nt, synthetic construct
  source 1..20: mol_type = other RNA
tagtgatcatgtaccctgaa

SEQ ID NO: 17923 - RNA, 20 nt, synthetic construct
  source 1..20: mol_type = other RNA
tagtgctactaaatatacag

SEQ ID NO: 17924 - RNA, 20 nt, synthetic construct
  source 1..20: mol_type = other RNA
tagtgtcaatctgtatattt

SEQ ID NO: 17925 - RNA, 20 nt, synthetic construct
  source 1..20: mol_type = other RNA
tagtttacagcaatcacctg

SEQ ID NO: 17926 - RNA, 20 nt, synthetic construct
  source 1..20: mol_type = other RNA
tataatattttcttcccact

SEQ ID NO: 17927 - RNA, 20 nt, synthetic construct
  source 1..20: mol_type = other RNA
tatacagattgacactaaat

SEQ ID NO: 17928 - RNA, 20 nt, synthetic construct
  source 1..20: mol_type = other RNA
tatatctctctagaaacacc

SEQ ID NO: 17929 - RNA, 20 nt, synthetic construct
  source 1..20: mol_type = other RNA
tatatctggtcaaggtggcc

SEQ ID NO: 17930 - RNA, 20 nt, synthetic construct
  source 1..20: mol_type = other RNA
tatatgccagacccctctct

SEQ ID NO: 17931 - RNA, 20 nt, synthetic construct
  source 1..20: mol_type = other RNA
tatattcagggtacatgatc

SEQ ID NO: 17932 - RNA, 20 nt, synthetic construct
  source 1..20: mol_type = other RNA
tatattcccaacctggctag

SEQ ID NO: 17933 - RNA, 20 nt, synthetic construct
  source 1..20: mol_type = other RNA
tatattgcctaatgtttcag

SEQ ID NO: 17934 - RNA, 20 nt, synthetic construct
  source 1..20: mol_type = other RNA
tatatttagtagcactaaca

SEQ ID NO: 17935 - RNA, 20 nt, synthetic construct
  source 1..20: mol_type = other RNA
tatatttagtgtcaatctgt

SEQ ID NO: 17936 - RNA, 20 nt, synthetic construct
  source 1..20: mol_type = other RNA
tatcagacaggctgggtttg

SEQ ID NO: 17937 - RNA, 20 nt, synthetic construct
  source 1..20: mol_type = other RNA
tatcattaaggaaaggctac

SEQ ID NO: 17938 - RNA, 20 nt, synthetic construct
  source 1..20: mol_type = other RNA
tatccctgttgtattttatc

SEQ ID NO: 17939 - RNA, 20 nt, synthetic construct
  source 1..20: mol_type = other RNA
tatcgggtccaactcaacca

SEQ ID NO: 17940 - RNA, 20 nt, synthetic construct
  source 1..20: mol_type = other RNA
tatctctctagaaacaccct

SEQ ID NO: 17941 - RNA, 20 nt, synthetic construct
  source 1..20: mol_type = other RNA
tatctggtcaaggtggcctg

SEQ ID NO: 17942 - RNA, 20 nt, synthetic construct
  source 1..20: mol_type = other RNA
tatgacttttggagagttat

SEQ ID NO: 17943 - RNA, 20 nt, synthetic construct
  source 1..20: mol_type = other RNA
tatgatcaaatggagtaatg

SEQ ID NO: 17944 - RNA, 20 nt, synthetic construct
  source 1..20: mol_type = other RNA
tatgcatttaggttttgttt

SEQ ID NO: 17945 - RNA, 20 nt, synthetic construct
  source 1..20: mol_type = other RNA
tatgccagacccctctctga

SEQ ID NO: 17946 - RNA, 20 nt, synthetic construct
  source 1..20: mol_type = other RNA
tatgcccacagtaaaacaaa

SEQ ID NO: 17947 - RNA, 20 nt, synthetic construct
  source 1..20: mol_type = other RNA
tatggcaaatgggacagaac

SEQ ID NO: 17948 - RNA, 20 nt, synthetic construct
  source 1..20: mol_type = other RNA
tatgttctgtcccatttgcc

SEQ ID NO: 17949 - RNA, 20 nt, synthetic construct
  source 1..20: mol_type = other RNA
tattaaatgcctcagggatc

SEQ ID NO: 17950 - RNA, 20 nt, synthetic construct
  source 1..20: mol_type = other RNA
tattagaagctcagatgcaa

SEQ ID NO: 17951 - RNA, 20 nt, synthetic construct
  source 1..20: mol_type = other RNA
tattattagaagctcagatg

SEQ ID NO: 17952 - RNA, 20 nt, synthetic construct
  source 1..20: mol_type = other RNA
tattcagggtacatgatcac

SEQ ID NO: 17953 - RNA, 20 nt, synthetic construct
  source 1..20: mol_type = other RNA
tattcccaacctggctagtt

SEQ ID NO: 17954 - RNA, 20 nt, synthetic construct
  source 1..20: mol_type = other RNA
tattgcctaatgtttcagaa

SEQ ID NO: 17955 - RNA, 20 nt, synthetic construct
  source 1..20: mol_type = other RNA
tatttaagcttccaaaactt

SEQ ID NO: 17956 - RNA, 20 nt, synthetic construct
  source 1..20: mol_type = other RNA
tatttagtagcactaacact

SEQ ID NO: 17957 - RNA, 20 nt, synthetic construct
  source 1..20: mol_type = other RNA
tatttagtgtcaatctgtat

SEQ ID NO: 17958 - RNA, 20 nt, synthetic construct
  source 1..20: mol_type = other RNA
tatttgccagctcttgtatg

SEQ ID NO: 17959 - RNA, 20 nt, synthetic construct
  source 1..20: mol_type = other RNA
tattttatcgggtccaactc

SEQ ID NO: 17960 - RNA, 20 nt, synthetic construct
  source 1..20: mol_type = other RNA
tattttcttcccacttcccc

SEQ ID NO: 17961 - RNA, 20 nt, synthetic construct
  source 1..20: mol_type = other RNA
tcaaacagagagttccaggc

SEQ ID NO: 17962 - RNA, 20 nt, synthetic construct
  source 1..20: mol_type = other RNA
tcaaacccagcctgtctgat

SEQ ID NO: 17963 - RNA, 20 nt, synthetic construct
  source 1..20: mol_type = other RNA
tcaaatggagtaatgcatgt

SEQ ID NO: 17964 - RNA, 20 nt, synthetic construct
  source 1..20: mol_type = other RNA
tcaaccagttactggcttta

SEQ ID NO: 17965 - RNA, 20 nt, synthetic construct
  source 1..20: mol_type = other RNA
tcaaccatttaaggtatttg

SEQ ID NO: 17966 - RNA, 20 nt, synthetic construct
  source 1..20: mol_type = other RNA
tcaagaggtggattggggaa

SEQ ID NO: 17967 - RNA, 20 nt, synthetic construct
  source 1..20: mol_type = other RNA
tcaaggtggcctggtactcc

SEQ ID NO: 17968 - RNA, 20 nt, synthetic construct
  source 1..20: mol_type = other RNA
tcaatctgtatatttagtag

SEQ ID NO: 17969 - RNA, 20 nt, synthetic construct
  source 1..20: mol_type = other RNA
tcacaaaatcttgccgcctt

SEQ ID NO: 17970 - RNA, 20 nt, synthetic construct
  source 1..20: mol_type = other RNA
tcacatgcattactccattt

SEQ ID NO: 17971 - RNA, 20 nt, synthetic construct
  source 1..20: mol_type = other RNA
tcacctatccctgttgtatt

SEQ ID NO: 17972 - RNA, 20 nt, synthetic construct
  source 1..20: mol_type = other RNA
tcacctgtggatgctaatta

SEQ ID NO: 17973 - RNA, 20 nt, synthetic construct
  source 1..20: mol_type = other RNA
tcactaaaaggcagctactc

SEQ ID NO: 17974 - RNA, 20 nt, synthetic construct
  source 1..20: mol_type = other RNA
tcactgtaatcttttctaag

SEQ ID NO: 17975 - RNA, 20 nt, synthetic construct
  source 1..20: mol_type = other RNA
tcagaaacagtactttccaa

SEQ ID NO: 17976 - RNA, 20 nt, synthetic construct
  source 1..20: mol_type = other RNA
tcagacaggctgggtttgaa

SEQ ID NO: 17977 - RNA, 20 nt, synthetic construct
  source 1..20: mol_type = other RNA
tcagagcacagattcatcct

SEQ ID NO: 17978 - RNA, 20 nt, synthetic construct
  source 1..20: mol_type = other RNA
tcagatgcaaagagctctct

SEQ ID NO: 17979 - RNA, 20 nt, synthetic construct
  source 1..20: mol_type = other RNA
tcagggatcagagcacagat

SEQ ID NO: 17980 - RNA, 20 nt, synthetic construct
  source 1..20: mol_type = other RNA
tcagggtacatgatcactaa

SEQ ID NO: 17981 - RNA, 20 nt, synthetic construct
  source 1..20: mol_type = other RNA
tcaggtcttcattagattcc

SEQ ID NO: 17982 - RNA, 20 nt, synthetic construct
  source 1..20: mol_type = other RNA
tcagttaagttttggaagct

SEQ ID NO: 17983 - RNA, 20 nt, synthetic construct
  source 1..20: mol_type = other RNA
tcataaagccagtaactggt

SEQ ID NO: 17984 - RNA, 20 nt, synthetic construct
  source 1..20: mol_type = other RNA
tcataacattaaaagctaag

SEQ ID NO: 17985 - RNA, 20 nt, synthetic construct
  source 1..20: mol_type = other RNA
tcataatggaaagtatgttc

SEQ ID NO: 17986 - RNA, 20 nt, synthetic construct
  source 1..20: mol_type = other RNA
tcatcctgcctggaactctc

SEQ ID NO: 17987 - RNA, 20 nt, synthetic construct
  source 1..20: mol_type = other RNA
tcatgaaattaggtacaaag

SEQ ID NO: 17988 - RNA, 20 nt, synthetic construct
  source 1..20: mol_type = other RNA
tcatgagctaaaaaacaaag

SEQ ID NO: 17989 - RNA, 20 nt, synthetic construct
  source 1..20: mol_type = other RNA
tcatgcctctcattttggaa

SEQ ID NO: 17990 - RNA, 20 nt, synthetic construct
  source 1..20: mol_type = other RNA
tcatgtaccctgaatataag

SEQ ID NO: 17991 - RNA, 20 nt, synthetic construct
  source 1..20: mol_type = other RNA
tcattaaggaaaggctacta

SEQ ID NO: 17992 - RNA, 20 nt, synthetic construct
  source 1..20: mol_type = other RNA
tcattagattccccaatcca

SEQ ID NO: 17993 - RNA, 20 nt, synthetic construct
  source 1..20: mol_type = other RNA
tcattgaaaatgaagagaag

SEQ ID NO: 17994 - RNA, 20 nt, synthetic construct
  source 1..20: mol_type = other RNA
tcattttggaaagtactgtt

SEQ ID NO: 17995 - RNA, 20 nt, synthetic construct
  source 1..20: mol_type = other RNA
tccaaaacttaactgaaaaa

SEQ ID NO: 17996 - RNA, 20 nt, synthetic construct
  source 1..20: mol_type = other RNA
tccaaaagtcataaagccag

SEQ ID NO: 17997 - RNA, 20 nt, synthetic construct
  source 1..20: mol_type = other RNA
tccaaaatgagaggcatgac

SEQ ID NO: 17998 - RNA, 20 nt, synthetic construct
  source 1..20: mol_type = other RNA
tccaactcaaccatttaagg

SEQ ID NO: 17999 - RNA, 20 nt, synthetic construct
  source 1..20: mol_type = other RNA
tccacaggtgattgctgtaa

SEQ ID NO: 18000 - RNA, 20 nt, synthetic construct
  source 1..20: mol_type = other RNA
tccacctcttgatggggcta

SEQ ID NO: 18001 - RNA, 20 nt, synthetic construct
  source 1..20: mol_type = other RNA
tccaggcaggatgaatctgt

SEQ ID NO: 18002 - RNA, 20 nt, synthetic construct
  source 1..20: mol_type = other RNA
tccatggggaagtgggaaga

SEQ ID NO: 18003 - RNA, 20 nt, synthetic construct
  source 1..20: mol_type = other RNA
tccattatgatcaaatggag

SEQ ID NO: 18004 - RNA, 20 nt, synthetic construct
  source 1..20: mol_type = other RNA
tccatttgatcataatggaa

SEQ ID NO: 18005 - RNA, 20 nt, synthetic construct
  source 1..20: mol_type = other RNA
tcccaacctggctagtttac

SEQ ID NO: 18006 - RNA, 20 nt, synthetic construct
  source 1..20: mol_type = other RNA
tcccactgtcacatgcatta

SEQ ID NO: 18007 - RNA, 20 nt, synthetic construct
  source 1..20: mol_type = other RNA
tcccacttccccatggatgg

SEQ ID NO: 18008 - RNA, 20 nt, synthetic construct
  source 1..20: mol_type = other RNA
tcccagacaaggaggagtag

SEQ ID NO: 18009 - RNA, 20 nt, synthetic construct
  source 1..20: mol_type = other RNA
tcccatttgccatagtcctc

SEQ ID NO: 18010 - RNA, 20 nt, synthetic construct
  source 1..20: mol_type = other RNA
tccccaatccacctcttgat

SEQ ID NO: 18011 - RNA, 20 nt, synthetic construct
  source 1..20: mol_type = other RNA
tccccacagcctcccagaca

SEQ ID NO: 18012 - RNA, 20 nt, synthetic construct
  source 1..20: mol_type = other RNA
tccccatggatggtctagtc

SEQ ID NO: 18013 - RNA, 20 nt, synthetic construct
  source 1..20: mol_type = other RNA
tccctcaaacagagagttcc

SEQ ID NO: 18014 - RNA, 20 nt, synthetic construct
  source 1..20: mol_type = other RNA
tccctgaggcatttaatatg

SEQ ID NO: 18015 - RNA, 20 nt, synthetic construct
  source 1..20: mol_type = other RNA
tccctgttgtattttatcgg

SEQ ID NO: 18016 - RNA, 20 nt, synthetic construct
  source 1..20: mol_type = other RNA
tcctcacctatccctgttgt

SEQ ID NO: 18017 - RNA, 20 nt, synthetic construct
  source 1..20: mol_type = other RNA
tcctccttctccccacagcc

SEQ ID NO: 18018 - RNA, 20 nt, synthetic construct
  source 1..20: mol_type = other RNA
tcctccttgtctgggaggct

SEQ ID NO: 18019 - RNA, 20 nt, synthetic construct
  source 1..20: mol_type = other RNA
tcctcttcttagaaaagatt

SEQ ID NO: 18020 - RNA, 20 nt, synthetic construct
  source 1..20: mol_type = other RNA
tcctgcctggaactctctgt

SEQ ID NO: 18021 - RNA, 20 nt, synthetic construct
  source 1..20: mol_type = other RNA
tccttaatgatagggtgttt

SEQ ID NO: 18022 - RNA, 20 nt, synthetic construct
  source 1..20: mol_type = other RNA
tccttctccccacagcctcc

SEQ ID NO: 18023 - RNA, 20 nt, synthetic construct
  source 1..20: mol_type = other RNA
tccttgtctgggaggctgtg

SEQ ID NO: 18024 - RNA, 20 nt, synthetic construct
  source 1..20: mol_type = other RNA
tcgggtccaactcaaccatt

SEQ ID NO: 18025 - RNA, 20 nt, synthetic construct
  source 1..20: mol_type = other RNA
tctaagaagaggacaagtat

SEQ ID NO: 18026 - RNA, 20 nt, synthetic construct
  source 1..20: mol_type = other RNA
tctaatgaagacctgatttt

SEQ ID NO: 18027 - RNA, 20 nt, synthetic construct
  source 1..20: mol_type = other RNA
tctagaaacaccctatcatt

SEQ ID NO: 18028 - RNA, 20 nt, synthetic construct
  source 1..20: mol_type = other RNA
tctagagagatatatctggt

SEQ ID NO: 18029 - RNA, 20 nt, synthetic construct
  source 1..20: mol_type = other RNA
tctagtcatgcctctcattt

SEQ ID NO: 18030 - RNA, 20 nt, synthetic construct
  source 1..20: mol_type = other RNA
tctcacaaaatcttgccgcc

SEQ ID NO: 18031 - RNA, 20 nt, synthetic construct
  source 1..20: mol_type = other RNA
tctcattttggaaagtactg

SEQ ID NO: 18032 - RNA, 20 nt, synthetic construct
  source 1..20: mol_type = other RNA
tctccaaaagtcataaagcc

SEQ ID NO: 18033 - RNA, 20 nt, synthetic construct
  source 1..20: mol_type = other RNA
tctccccacagcctcccaga

SEQ ID NO: 18034 - RNA, 20 nt, synthetic construct
  source 1..20: mol_type = other RNA
tctctagaaacaccctatca

SEQ ID NO: 18035 - RNA, 20 nt, synthetic construct
  source 1..20: mol_type = other RNA
tctctctagaaacaccctat

SEQ ID NO: 18036 - RNA, 20 nt, synthetic construct
  source 1..20: mol_type = other RNA
tctctgactttgtacctaat

SEQ ID NO: 18037 - RNA, 20 nt, synthetic construct
  source 1..20: mol_type = other RNA
tctctgtttgagggaaggcg

SEQ ID NO: 18038 - RNA, 20 nt, synthetic construct
  source 1..20: mol_type = other RNA
tctcttagcttttaatgtta

SEQ ID NO: 18039 - RNA, 20 nt, synthetic construct
  source 1..20: mol_type = other RNA
tctcttcattttcaatgaaa

SEQ ID NO: 18040 - RNA, 20 nt, synthetic construct
  source 1..20: mol_type = other RNA
tctgaaacattaggcaatat

SEQ ID NO: 18041 - RNA, 20 nt, synthetic construct
  source 1..20: mol_type = other RNA
tctgacctgtgtgtgggttt

SEQ ID NO: 18042 - RNA, 20 nt, synthetic construct
  source 1..20: mol_type = other RNA
tctgactttgtacctaattt

SEQ ID NO: 18043 - RNA, 20 nt, synthetic construct
  source 1..20: mol_type = other RNA
tctgagcttctaataataag

SEQ ID NO: 18044 - RNA, 20 nt, synthetic construct
  source 1..20: mol_type = other RNA
tctgatacttgtcctcttct

SEQ ID NO: 18045 - RNA, 20 nt, synthetic construct
  source 1..20: mol_type = other RNA
tctgatccctgaggcattta

SEQ ID NO: 18046 - RNA, 20 nt, synthetic construct
  source 1..20: mol_type = other RNA
tctgggaggctgtggggaga

SEQ ID NO: 18047 - RNA, 20 nt, synthetic construct
  source 1..20: mol_type = other RNA
tctggtcaaggtggcctggt

SEQ ID NO: 18048 - RNA, 20 nt, synthetic construct
  source 1..20: mol_type = other RNA
tctgtatatttagtagcact

SEQ ID NO: 18049 - RNA, 20 nt, synthetic construct
  source 1..20: mol_type = other RNA
tctgtcccatttgccatagt

SEQ ID NO: 18050 - RNA, 20 nt, synthetic construct
  source 1..20: mol_type = other RNA
tctgtgctctgatccctgag

SEQ ID NO: 18051 - RNA, 20 nt, synthetic construct
  source 1..20: mol_type = other RNA
tctgtttgagggaaggcggc

SEQ ID NO: 18052 - RNA, 20 nt, synthetic construct
  source 1..20: mol_type = other RNA
tcttagaaaagattacagtg

SEQ ID NO: 18053 - RNA, 20 nt, synthetic construct
  source 1..20: mol_type = other RNA
tcttagcttttaatgttatg

SEQ ID NO: 18054 - RNA, 20 nt, synthetic construct
  source 1..20: mol_type = other RNA
tcttattattagaagctcag

SEQ ID NO: 18055 - RNA, 20 nt, synthetic construct
  source 1..20: mol_type = other RNA
tcttcattagattccccaat

SEQ ID NO: 18056 - RNA, 20 nt, synthetic construct
  source 1..20: mol_type = other RNA
tcttcccacttccccatgga

SEQ ID NO: 18057 - RNA, 20 nt, synthetic construct
  source 1..20: mol_type = other RNA
tcttcttagaaaagattaca

SEQ ID NO: 18058 - RNA, 20 nt, synthetic construct
  source 1..20: mol_type = other RNA
tcttgatggggctagtagcc

SEQ ID NO: 18059 - RNA, 20 nt, synthetic construct
  source 1..20: mol_type = other RNA
tcttgccgccttccctcaaa

SEQ ID NO: 18060 - RNA, 20 nt, synthetic construct
  source 1..20: mol_type = other RNA
tcttgtatgcatttaggttt

SEQ ID NO: 18061 - RNA, 20 nt, synthetic construct
  source 1..20: mol_type = other RNA
tctttgcatctgagcttcta

SEQ ID NO: 18062 - RNA, 20 nt, synthetic construct
  source 1..20: mol_type = other RNA
tctttgttttttagctcatg

SEQ ID NO: 18063 - RNA, 20 nt, synthetic construct
  source 1..20: mol_type = other RNA
tcttttctaagaagaggaca

SEQ ID NO: 18064 - RNA, 20 nt, synthetic construct
  source 1..20: mol_type = other RNA
tgaaaaattaatttatgccc

SEQ ID NO: 18065 - RNA, 20 nt, synthetic construct
  source 1..20: mol_type = other RNA
tgaaaatgaagagaagtgtt

SEQ ID NO: 18066 - RNA, 20 nt, synthetic construct
  source 1..20: mol_type = other RNA
tgaaacattaggcaatatat

SEQ ID NO: 18067 - RNA, 20 nt, synthetic construct
  source 1..20: mol_type = other RNA
tgaaattaggtacaaagtca

SEQ ID NO: 18068 - RNA, 20 nt, synthetic construct
  source 1..20: mol_type = other RNA
tgaagagaagtgttagtgct

SEQ ID NO: 18069 - RNA, 20 nt, synthetic construct
  source 1..20: mol_type = other RNA
tgaatctgtgctctgatccc

SEQ ID NO: 18070 - RNA, 20 nt, synthetic construct
  source 1..20: mol_type = other RNA
tgaatttgggctcaaccagt

SEQ ID NO: 18071 - RNA, 20 nt, synthetic construct
  source 1..20: mol_type = other RNA
tgacactaaatatatgtgta

SEQ ID NO: 18072 - RNA, 20 nt, synthetic construct
  source 1..20: mol_type = other RNA
tgacagtgggatttgcgttt

SEQ ID NO: 18073 - RNA, 20 nt, synthetic construct
  source 1..20: mol_type = other RNA
tgaccagatatatctctcta

SEQ ID NO: 18074 - RNA, 20 nt, synthetic construct
  source 1..20: mol_type = other RNA
tgacctgtgtgtgggttttg

SEQ ID NO: 18075 - RNA, 20 nt, synthetic construct
  source 1..20: mol_type = other RNA
tgactagaccatccatgggg

SEQ ID NO: 18076 - RNA, 20 nt, synthetic construct
  source 1..20: mol_type = other RNA
tgactttgtacctaatttca

SEQ ID NO: 18077 - RNA, 20 nt, synthetic construct
  source 1..20: mol_type = other RNA
tgacttttggagagttattt

SEQ ID NO: 18078 - RNA, 20 nt, synthetic construct
  source 1..20: mol_type = other RNA
tgagagcatcactgtaatct

SEQ ID NO: 18079 - RNA, 20 nt, synthetic construct
  source 1..20: mol_type = other RNA
tgagaggcatgactagacca

SEQ ID NO: 18080 - RNA, 20 nt, synthetic construct
  source 1..20: mol_type = other RNA
tgagcccaaattcaaaccca

SEQ ID NO: 18081 - RNA, 20 nt, synthetic construct
  source 1..20: mol_type = other RNA
tgagctaaaaaacaaagaaa

SEQ ID NO: 18082 - RNA, 20 nt, synthetic construct
  source 1..20: mol_type = other RNA
tgagcttctaataataagaa

SEQ ID NO: 18083 - RNA, 20 nt, synthetic construct
  source 1..20: mol_type = other RNA
tgaggactatggcaaatggg

SEQ ID NO: 18084 - RNA, 20 nt, synthetic construct
  source 1..20: mol_type = other RNA
tgaggcatttaatatgttct

SEQ ID NO: 18085 - RNA, 20 nt, synthetic construct
  source 1..20: mol_type = other RNA
tgagggaaggcggcaagatt

SEQ ID NO: 18086 - RNA, 20 nt, synthetic construct
  source 1..20: mol_type = other RNA
tgagttggacccgataaaat

SEQ ID NO: 18087 - RNA, 20 nt, synthetic construct
  source 1..20: mol_type = other RNA
tgatacttgtcctcttctta

SEQ ID NO: 18088 - RNA, 20 nt, synthetic construct
  source 1..20: mol_type = other RNA
tgatagggtgtttctagaga

SEQ ID NO: 18089 - RNA, 20 nt, synthetic construct
  source 1..20: mol_type = other RNA
tgatcaaatggagtaatgca

SEQ ID NO: 18090 - RNA, 20 nt, synthetic construct
  source 1..20: mol_type = other RNA
tgatcactaaaaggcagcta

SEQ ID NO: 18091 - RNA, 20 nt, synthetic construct
  source 1..20: mol_type = other RNA
tgatcataatggaaagtatg

SEQ ID NO: 18092 - RNA, 20 nt, synthetic construct
  source 1..20: mol_type = other RNA
tgatcatgtaccctgaatat

SEQ ID NO: 18093 - RNA, 20 nt, synthetic construct
  source 1..20: mol_type = other RNA
tgatccctgaggcatttaat

SEQ ID NO: 18094 - RNA, 20 nt, synthetic construct
  source 1..20: mol_type = other RNA
tgatgctctcacaaaatctt

SEQ ID NO: 18095 - RNA, 20 nt, synthetic construct
  source 1..20: mol_type = other RNA
tgatggggctagtagccttt

SEQ ID NO: 18096 - RNA, 20 nt, synthetic construct
  source 1..20: mol_type = other RNA
tgattgctgtaaactagcca

SEQ ID NO: 18097 - RNA, 20 nt, synthetic construct
  source 1..20: mol_type = other RNA
tgcaaagagctctcttagct

SEQ ID NO: 18098 - RNA, 20 nt, synthetic construct
  source 1..20: mol_type = other RNA
tgcatacaagagctggcaaa

SEQ ID NO: 18099 - RNA, 20 nt, synthetic construct
  source 1..20: mol_type = other RNA
tgcatctgagcttctaataa

SEQ ID NO: 18100 - RNA, 20 nt, synthetic construct
  source 1..20: mol_type = other RNA
tgcatgtgacagtgggattt

SEQ ID NO: 18101 - RNA, 20 nt, synthetic construct
  source 1..20: mol_type = other RNA
tgcattactccatttgatca

SEQ ID NO: 18102 - RNA, 20 nt, synthetic construct
  source 1..20: mol_type = other RNA
tgcatttaggttttgtttct

SEQ ID NO: 18103 - RNA, 20 nt, synthetic construct
  source 1..20: mol_type = other RNA
tgccagacccctctctgact

SEQ ID NO: 18104 - RNA, 20 nt, synthetic construct
  source 1..20: mol_type = other RNA
tgccagctcttgtatgcatt

SEQ ID NO: 18105 - RNA, 20 nt, synthetic construct
  source 1..20: mol_type = other RNA
tgccatagtcctcacctatc

SEQ ID NO: 18106 - RNA, 20 nt, synthetic construct
  source 1..20: mol_type = other RNA
tgcccacagtaaaacaaaaa

SEQ ID NO: 18107 - RNA, 20 nt, synthetic construct
  source 1..20: mol_type = other RNA
tgccgccttccctcaaacag

SEQ ID NO: 18108 - RNA, 20 nt, synthetic construct
  source 1..20: mol_type = other RNA
tgcctaatgtttcagaaaca

SEQ ID NO: 18109 - RNA, 20 nt, synthetic construct
  source 1..20: mol_type = other RNA
tgcctcagggatcagagcac

SEQ ID NO: 18110 - RNA, 20 nt, synthetic construct
  source 1..20: mol_type = other RNA
tgcctctcattttggaaagt

SEQ ID NO: 18111 - RNA, 20 nt, synthetic construct
  source 1..20: mol_type = other RNA
tgcctggaactctctgtttg

SEQ ID NO: 18112 - RNA, 20 nt, synthetic construct
  source 1..20: mol_type = other RNA
tgccttttagtgatcatgta

SEQ ID NO: 18113 - RNA, 20 nt, synthetic construct
  source 1..20: mol_type = other RNA
tgcgttttaattagcatcca

SEQ ID NO: 18114 - RNA, 20 nt, synthetic construct
  source 1..20: mol_type = other RNA
tgctaattaaaacgcaaatc

SEQ ID NO: 18115 - RNA, 20 nt, synthetic construct
  source 1..20: mol_type = other RNA
tgctactaaatatacagatt

SEQ ID NO: 18116 - RNA, 20 nt, synthetic construct
  source 1..20: mol_type = other RNA
tgctctcacaaaatcttgcc

SEQ ID NO: 18117 - RNA, 20 nt, synthetic construct
  source 1..20: mol_type = other RNA
tgctctgatccctgaggcat

SEQ ID NO: 18118 - RNA, 20 nt, synthetic construct
  source 1..20: mol_type = other RNA
tgctgtaaactagccaggtt

SEQ ID NO: 18119 - RNA, 20 nt, synthetic construct
  source 1..20: mol_type = other RNA
tggaaagtactgtttctgaa

SEQ ID NO: 18120 - RNA, 20 nt, synthetic construct
  source 1..20: mol_type = other RNA
tggaaagtatgttctgtccc

SEQ ID NO: 18121 - RNA, 20 nt, synthetic construct
  source 1..20: mol_type = other RNA
tggaactctctgtttgaggg

SEQ ID NO: 18122 - RNA, 20 nt, synthetic construct
  source 1..20: mol_type = other RNA
tggaagcttaaataactctc

SEQ ID NO: 18123 - RNA, 20 nt, synthetic construct
  source 1..20: mol_type = other RNA
tggacccgataaaatacaac

SEQ ID NO: 18124 - RNA, 20 nt, synthetic construct
  source 1..20: mol_type = other RNA
tggagagttatttaagcttc

SEQ ID NO: 18125 - RNA, 20 nt, synthetic construct
  source 1..20: mol_type = other RNA
tggagtaatgcatgtgacag

SEQ ID NO: 18126 - RNA, 20 nt, synthetic construct
  source 1..20: mol_type = other RNA
tggatgctaattaaaacgca

SEQ ID NO: 18127 - RNA, 20 nt, synthetic construct
  source 1..20: mol_type = other RNA
tggatggtctagtcatgcct

SEQ ID NO: 18128 - RNA, 20 nt, synthetic construct
  source 1..20: mol_type = other RNA
tggattggggaatctaatga

SEQ ID NO: 18129 - RNA, 20 nt, synthetic construct
  source 1..20: mol_type = other RNA
tggcaaataccttaaatggt

SEQ ID NO: 18130 - RNA, 20 nt, synthetic construct
  source 1..20: mol_type = other RNA
tggcaaatgggacagaacat

SEQ ID NO: 18131 - RNA, 20 nt, synthetic construct
  source 1..20: mol_type = other RNA
tggcctggtactcctccttc

SEQ ID NO: 18132 - RNA, 20 nt, synthetic construct
  source 1..20: mol_type = other RNA
tggctagtttacagcaatca

SEQ ID NO: 18133 - RNA, 20 nt, synthetic construct
  source 1..20: mol_type = other RNA
tggctttatgacttttggag

SEQ ID NO: 18134 - RNA, 20 nt, synthetic construct
  source 1..20: mol_type = other RNA
tgggaatatattgcctaatg

SEQ ID NO: 18135 - RNA, 20 nt, synthetic construct
  source 1..20: mol_type = other RNA
tgggacagaacatactttcc

SEQ ID NO: 18136 - RNA, 20 nt, synthetic construct
  source 1..20: mol_type = other RNA
tgggaggctgtggggagaag

SEQ ID NO: 18137 - RNA, 20 nt, synthetic construct
  source 1..20: mol_type = other RNA
tgggatttgcgttttaatta

SEQ ID NO: 18138 - RNA, 20 nt, synthetic construct
  source 1..20: mol_type = other RNA
tgggcataaattaatttttc

SEQ ID NO: 18139 - RNA, 20 nt, synthetic construct
  source 1..20: mol_type = other RNA
tgggctcaaccagttactgg

SEQ ID NO: 18140 - RNA, 20 nt, synthetic construct
  source 1..20: mol_type = other RNA
tggggaagtgggaagaaaat

SEQ ID NO: 18141 - RNA, 20 nt, synthetic construct
  source 1..20: mol_type = other RNA
tggggaatctaatgaagacc

SEQ ID NO: 18142 - RNA, 20 nt, synthetic construct
  source 1..20: mol_type = other RNA
tggggagaaggaggagtacc

SEQ ID NO: 18143 - RNA, 20 nt, synthetic construct
  source 1..20: mol_type = other RNA
tggggctagtagcctttcct

SEQ ID NO: 18144 - RNA, 20 nt, synthetic construct
  source 1..20: mol_type = other RNA
tgggtttgaatttgggctca

SEQ ID NO: 18145 - RNA, 20 nt, synthetic construct
  source 1..20: mol_type = other RNA
tgggttttgtttttgtttta

SEQ ID NO: 18146 - RNA, 20 nt, synthetic construct
  source 1..20: mol_type = other RNA
tggtactcctccttctcccc

SEQ ID NO: 18147 - RNA, 20 nt, synthetic construct
  source 1..20: mol_type = other RNA
tggtcaaggtggcctggtac

SEQ ID NO: 18148 - RNA, 20 nt, synthetic construct
  source 1..20: mol_type = other RNA
tggtctagtcatgcctctca

SEQ ID NO: 18149 - RNA, 20 nt, synthetic construct
  source 1..20: mol_type = other RNA
tggttgagcccaaattcaaa

SEQ ID NO: 18150 - RNA, 20 nt, synthetic construct
  source 1..20: mol_type = other RNA
tggttgagttggacccgata

SEQ ID NO: 18151 - RNA, 20 nt, synthetic construct
  source 1..20: mol_type = other RNA
tgtaaactagccaggttggg

SEQ ID NO: 18152 - RNA, 20 nt, synthetic construct
  source 1..20: mol_type = other RNA
tgtaatcttttctaagaaga

SEQ ID NO: 18153 - RNA, 20 nt, synthetic construct
  source 1..20: mol_type = other RNA
tgtaccctgaatataagtgt

SEQ ID NO: 18154 - RNA, 20 nt, synthetic construct
  source 1..20: mol_type = other RNA
tgtacctaatttcatgagct

SEQ ID NO: 18155 - RNA, 20 nt, synthetic construct
  source 1..20: mol_type = other RNA
tgtatatttagtagcactaa

SEQ ID NO: 18156 - RNA, 20 nt, synthetic construct
  source 1..20: mol_type = other RNA
tgtatgcatttaggttttgt

SEQ ID NO: 18157 - RNA, 20 nt, synthetic construct
  source 1..20: mol_type = other RNA
tgtattttatcgggtccaac

SEQ ID NO: 18158 - RNA, 20 nt, synthetic construct
  source 1..20: mol_type = other RNA
tgtcaatctgtatatttagt

SEQ ID NO: 18159 - RNA, 20 nt, synthetic construct
  source 1..20: mol_type = other RNA
tgtcacatgcattactccat

SEQ ID NO: 18160 - RNA, 20 nt, synthetic construct
  source 1..20: mol_type = other RNA
tgtcccatttgccatagtcc

SEQ ID NO: 18161 - RNA, 20 nt, synthetic construct
  source 1..20: mol_type = other RNA
tgtcctcttcttagaaaaga

SEQ ID NO: 18162 - RNA, 20 nt, synthetic construct
  source 1..20: mol_type = other RNA
tgtctgatacttgtcctctt

SEQ ID NO: 18163 - RNA, 20 nt, synthetic construct
  source 1..20: mol_type = other RNA
tgtctgggaggctgtgggga

SEQ ID NO: 18164 - RNA, 20 nt, synthetic construct
  source 1..20: mol_type = other RNA
tgtgacagtgggatttgcgt

SEQ ID NO: 18165 - RNA, 20 nt, synthetic construct
  source 1..20: mol_type = other RNA
tgtgagagcatcactgtaat

SEQ ID NO: 18166 - RNA, 20 nt, synthetic construct
  source 1..20: mol_type = other RNA
tgtgctctgatccctgaggc

SEQ ID NO: 18167 - RNA, 20 nt, synthetic construct
  source 1..20: mol_type = other RNA
tgtggatgctaattaaaacg

SEQ ID NO: 18168 - RNA, 20 nt, synthetic construct
  source 1..20: mol_type = other RNA
tgtgggcataaattaatttt

SEQ ID NO: 18169 - RNA, 20 nt, synthetic construct
  source 1..20: mol_type = other RNA
tgtggggagaaggaggagta

SEQ ID NO: 18170 - RNA, 20 nt, synthetic construct
  source 1..20: mol_type = other RNA
tgtgggttttgtttttgttt

SEQ ID NO: 18171 - RNA, 20 nt, synthetic construct
  source 1..20: mol_type = other RNA
tgtgtgggttttgtttttgt

SEQ ID NO: 18172 - RNA, 20 nt, synthetic construct
  source 1..20: mol_type = other RNA
tgtgtgtgggttttgttttt

SEQ ID NO: 18173 - RNA, 20 nt, synthetic construct
  source 1..20: mol_type = other RNA
tgttagtgctactaaatata

SEQ ID NO: 18174 - RNA, 20 nt, synthetic construct
  source 1..20: mol_type = other RNA
tgttctgtcccatttgccat

SEQ ID NO: 18175 - RNA, 20 nt, synthetic construct
  source 1..20: mol_type = other RNA
tgttcttattattagaagct

SEQ ID NO: 18176 - RNA, 20 nt, synthetic construct
  source 1..20: mol_type = other RNA
tgttgtattttatcgggtcc

SEQ ID NO: 18177 - RNA, 20 nt, synthetic construct
  source 1..20: mol_type = other RNA
tgtttcagaaacagtacttt

SEQ ID NO: 18178 - RNA, 20 nt, synthetic construct
  source 1..20: mol_type = other RNA
tgtttctagagagatatatc

SEQ ID NO: 18179 - RNA, 20 nt, synthetic construct
  source 1..20: mol_type = other RNA
tgtttctgaaacattaggca

SEQ ID NO: 18180 - RNA, 20 nt, synthetic construct
  source 1..20: mol_type = other RNA
tgtttctttgttttttagct

SEQ ID NO: 18181 - RNA, 20 nt, synthetic construct
  source 1..20: mol_type = other RNA
tgtttgagggaaggcggcaa

SEQ ID NO: 18182 - RNA, 20 nt, synthetic construct
  source 1..20: mol_type = other RNA
tgttttactgtgggcataaa

SEQ ID NO: 18183 - RNA, 20 nt, synthetic construct
  source 1..20: mol_type = other RNA
tgtttttgttttactgtggg

SEQ ID NO: 18184 - RNA, 20 nt, synthetic construct
  source 1..20: mol_type = other RNA
tgttttttagctcatgaaat

SEQ ID NO: 18185 - RNA, 20 nt, synthetic construct
  source 1..20: mol_type = other RNA
ttaaaacgcaaatcccactg

SEQ ID NO: 18186 - RNA, 20 nt, synthetic construct
  source 1..20: mol_type = other RNA
ttaaaagctaagagagctct

SEQ ID NO: 18187 - RNA, 20 nt, synthetic construct
  source 1..20: mol_type = other RNA
ttaaataactctccaaaagt

SEQ ID NO: 18188 - RNA, 20 nt, synthetic construct
  source 1..20: mol_type = other RNA
ttaaatgcctcagggatcag

SEQ ID NO: 18189 - RNA, 20 nt, synthetic construct
  source 1..20: mol_type = other RNA
ttaaatggttgagttggacc

SEQ ID NO: 18190 - RNA, 20 nt, synthetic construct
  source 1..20: mol_type = other RNA
ttaagcttccaaaacttaac

SEQ ID NO: 18191 - RNA, 20 nt, synthetic construct
  source 1..20: mol_type = other RNA
ttaaggaaaggctactagcc

SEQ ID NO: 18192 - RNA, 20 nt, synthetic construct
  source 1..20: mol_type = other RNA
ttaaggtatttgccagctct

SEQ ID NO: 18193 - RNA, 20 nt, synthetic construct
  source 1..20: mol_type = other RNA
ttaagttttggaagcttaaa

SEQ ID NO: 18194 - RNA, 20 nt, synthetic construct
  source 1..20: mol_type = other RNA
ttaatgatagggtgtttcta

SEQ ID NO: 18195 - RNA, 20 nt, synthetic construct
  source 1..20: mol_type = other RNA
ttaattagcatccacaggtg

SEQ ID NO: 18196 - RNA, 20 nt, synthetic construct
  source 1..20: mol_type = other RNA
ttaatttatgcccacagtaa

SEQ ID NO: 18197 - RNA, 20 nt, synthetic construct
  source 1..20: mol_type = other RNA
ttacagcaatcacctgtgga

SEQ ID NO: 18198 - RNA, 20 nt, synthetic construct
  source 1..20: mol_type = other RNA
ttacagtgatgctctcacaa

SEQ ID NO: 18199 - RNA, 20 nt, synthetic construct
  source 1..20: mol_type = other RNA
ttactccatttgatcataat

SEQ ID NO: 18200 - RNA, 20 nt, synthetic construct
  source 1..20: mol_type = other RNA
ttactggctttatgactttt

SEQ ID NO: 18201 - RNA, 20 nt, synthetic construct
  source 1..20: mol_type = other RNA
ttactgtgggcataaattaa

SEQ ID NO: 18202 - RNA, 20 nt, synthetic construct
  source 1..20: mol_type = other RNA
ttagaaaagattacagtgat

SEQ ID NO: 18203 - RNA, 20 nt, synthetic construct
  source 1..20: mol_type = other RNA
ttagaagctcagatgcaaag

SEQ ID NO: 18204 - RNA, 20 nt, synthetic construct
  source 1..20: mol_type = other RNA
ttagattccccaatccacct

SEQ ID NO: 18205 - RNA, 20 nt, synthetic construct
  source 1..20: mol_type = other RNA
ttagcatccacaggtgattg

SEQ ID NO: 18206 - RNA, 20 nt, synthetic construct
  source 1..20: mol_type = other RNA
ttagctcatgaaattaggta

SEQ ID NO: 18207 - RNA, 20 nt, synthetic construct
  source 1..20: mol_type = other RNA
ttaggcaatatattcccaac

SEQ ID NO: 18208 - RNA, 20 nt, synthetic construct
  source 1..20: mol_type = other RNA
ttaggtacaaagtcagagag

SEQ ID NO: 18209 - RNA, 20 nt, synthetic construct
  source 1..20: mol_type = other RNA
ttaggttttgtttctttgtt

SEQ ID NO: 18210 - RNA, 20 nt, synthetic construct
  source 1..20: mol_type = other RNA
ttagtagcactaacacttct

SEQ ID NO: 18211 - RNA, 20 nt, synthetic construct
  source 1..20: mol_type = other RNA
ttagtgatcatgtaccctga

SEQ ID NO: 18212 - RNA, 20 nt, synthetic construct
  source 1..20: mol_type = other RNA
ttagtgctactaaatataca

SEQ ID NO: 18213 - RNA, 20 nt, synthetic construct
  source 1..20: mol_type = other RNA
ttagtgtcaatctgtatatt

SEQ ID NO: 18214 - RNA, 20 nt, synthetic construct
  source 1..20: mol_type = other RNA
ttataatattttcttcccac

SEQ ID NO: 18215 - RNA, 20 nt, synthetic construct
  source 1..20: mol_type = other RNA
ttatatgccagacccctctc

SEQ ID NO: 18216 - RNA, 20 nt, synthetic construct
  source 1..20: mol_type = other RNA
ttatattcagggtacatgat

SEQ ID NO: 18217 - RNA, 20 nt, synthetic construct
  source 1..20: mol_type = other RNA
ttatcgggtccaactcaacc

SEQ ID NO: 18218 - RNA, 20 nt, synthetic construct
  source 1..20: mol_type = other RNA
ttatgacttttggagagtta

SEQ ID NO: 18219 - RNA, 20 nt, synthetic construct
  source 1..20: mol_type = other RNA
ttatgatcaaatggagtaat

SEQ ID NO: 18220 - RNA, 20 nt, synthetic construct
  source 1..20: mol_type = other RNA
ttatgcccacagtaaaacaa

SEQ ID NO: 18221 - RNA, 20 nt, synthetic construct
  source 1..20: mol_type = other RNA
ttattagaagctcagatgca

SEQ ID NO: 18222 - RNA, 20 nt, synthetic construct
  source 1..20: mol_type = other RNA
ttattattagaagctcagat

SEQ ID NO: 18223 - RNA, 20 nt, synthetic construct
  source 1..20: mol_type = other RNA
ttatttaagcttccaaaact

SEQ ID NO: 18224 - RNA, 20 nt, synthetic construct
  source 1..20: mol_type = other RNA
ttcaaacccagcctgtctga

SEQ ID NO: 18225 - RNA, 20 nt, synthetic construct
  source 1..20: mol_type = other RNA
ttcagaaacagtactttcca

SEQ ID NO: 18226 - RNA, 20 nt, synthetic construct
  source 1..20: mol_type = other RNA
ttcagggtacatgatcacta

SEQ ID NO: 18227 - RNA, 20 nt, synthetic construct
  source 1..20: mol_type = other RNA
ttcagttaagttttggaagc

SEQ ID NO: 18228 - RNA, 20 nt, synthetic construct
  source 1..20: mol_type = other RNA
ttcatcctgcctggaactct

SEQ ID NO: 18229 - RNA, 20 nt, synthetic construct
  source 1..20: mol_type = other RNA
ttcatgagctaaaaaacaaa

SEQ ID NO: 18230 - RNA, 20 nt, synthetic construct
  source 1..20: mol_type = other RNA
ttcattagattccccaatcc

SEQ ID NO: 18231 - RNA, 20 nt, synthetic construct
  source 1..20: mol_type = other RNA
ttcattgaaaatgaagagaa

SEQ ID NO: 18232 - RNA, 20 nt, synthetic construct
  source 1..20: mol_type = other RNA
ttccaaaacttaactgaaaa

SEQ ID NO: 18233 - RNA, 20 nt, synthetic construct
  source 1..20: mol_type = other RNA
ttccaaaatgagaggcatga

SEQ ID NO: 18234 - RNA, 20 nt, synthetic construct
  source 1..20: mol_type = other RNA
ttccaggcaggatgaatctg

SEQ ID NO: 18235 - RNA, 20 nt, synthetic construct
  source 1..20: mol_type = other RNA
ttccattatgatcaaatgga

SEQ ID NO: 18236 - RNA, 20 nt, synthetic construct
  source 1..20: mol_type = other RNA
ttcccaacctggctagttta

SEQ ID NO: 18237 - RNA, 20 nt, synthetic construct
  source 1..20: mol_type = other RNA
ttcccacttccccatggatg

SEQ ID NO: 18238 - RNA, 20 nt, synthetic construct
  source 1..20: mol_type = other RNA
ttccccaatccacctcttga

SEQ ID NO: 18239 - RNA, 20 nt, synthetic construct
  source 1..20: mol_type = other RNA
ttccccatggatggtctagt

SEQ ID NO: 18240 - RNA, 20 nt, synthetic construct
  source 1..20: mol_type = other RNA
ttccctcaaacagagagttc

SEQ ID NO: 18241 - RNA, 20 nt, synthetic construct
  source 1..20: mol_type = other RNA
ttccttaatgatagggtgtt

SEQ ID NO: 18242 - RNA, 20 nt, synthetic construct
  source 1..20: mol_type = other RNA
ttctaagaagaggacaagta

SEQ ID NO: 18243 - RNA, 20 nt, synthetic construct
  source 1..20: mol_type = other RNA
ttctagagagatatatctgg

SEQ ID NO: 18244 - RNA, 20 nt, synthetic construct
  source 1..20: mol_type = other RNA
ttctccccacagcctcccag

SEQ ID NO: 18245 - RNA, 20 nt, synthetic construct
  source 1..20: mol_type = other RNA
ttctcttcattttcaatgaa

SEQ ID NO: 18246 - RNA, 20 nt, synthetic construct
  source 1..20: mol_type = other RNA
ttctgaaacattaggcaata

SEQ ID NO: 18247 - RNA, 20 nt, synthetic construct
  source 1..20: mol_type = other RNA
ttctgtcccatttgccatag

SEQ ID NO: 18248 - RNA, 20 nt, synthetic construct
  source 1..20: mol_type = other RNA
ttcttagaaaagattacagt

SEQ ID NO: 18249 - RNA, 20 nt, synthetic construct
  source 1..20: mol_type = other RNA
ttcttattattagaagctca

SEQ ID NO: 18250 - RNA, 20 nt, synthetic construct
  source 1..20: mol_type = other RNA
ttcttcccacttccccatgg

SEQ ID NO: 18251 - RNA, 20 nt, synthetic construct
  source 1..20: mol_type = other RNA
ttctttgttttttagctcat

SEQ ID NO: 18252 - RNA, 20 nt, synthetic construct
  source 1..20: mol_type = other RNA
ttgaaaatgaagagaagtgt

SEQ ID NO: 18253 - RNA, 20 nt, synthetic construct
  source 1..20: mol_type = other RNA
ttgaatttgggctcaaccag

SEQ ID NO: 18254 - RNA, 20 nt, synthetic construct
  source 1..20: mol_type = other RNA
ttgacactaaatatatgtgt

SEQ ID NO: 18255 - RNA, 20 nt, synthetic construct
  source 1..20: mol_type = other RNA
ttgaccagatatatctctct

SEQ ID NO: 18256 - RNA, 20 nt, synthetic construct
  source 1..20: mol_type = other RNA
ttgagcccaaattcaaaccc

SEQ ID NO: 18257 - RNA, 20 nt, synthetic construct
  source 1..20: mol_type = other RNA
ttgagggaaggcggcaagat

SEQ ID NO: 18258 - RNA, 20 nt, synthetic construct
  source 1..20: mol_type = other RNA
ttgagttggacccgataaaa

SEQ ID NO: 18259 - RNA, 20 nt, synthetic construct
  source 1..20: mol_type = other RNA
ttgatcataatggaaagtat

SEQ ID NO: 18260 - RNA, 20 nt, synthetic construct
  source 1..20: mol_type = other RNA
ttgatggggctagtagcctt

SEQ ID NO: 18261 - RNA, 20 nt, synthetic construct
  source 1..20: mol_type = other RNA
ttgcatctgagcttctaata

SEQ ID NO: 18262 - RNA, 20 nt, synthetic construct
  source 1..20: mol_type = other RNA
ttgccagctcttgtatgcat

SEQ ID NO: 18263 - RNA, 20 nt, synthetic construct
  source 1..20: mol_type = other RNA
ttgccatagtcctcacctat

SEQ ID NO: 18264 - RNA, 20 nt, synthetic construct
  source 1..20: mol_type = other RNA
ttgccgccttccctcaaaca

SEQ ID NO: 18265 - RNA, 20 nt, synthetic construct
  source 1..20: mol_type = other RNA
ttgcctaatgtttcagaaac

SEQ ID NO: 18266 - RNA, 20 nt, synthetic construct
  source 1..20: mol_type = other RNA
ttgcgttttaattagcatcc

SEQ ID NO: 18267 - RNA, 20 nt, synthetic construct
  source 1..20: mol_type = other RNA
ttgctgtaaactagccaggt

SEQ ID NO: 18268 - RNA, 20 nt, synthetic construct
  source 1..20: mol_type = other RNA
ttggaaagtactgtttctga

SEQ ID NO: 18269 - RNA, 20 nt, synthetic construct
  source 1..20: mol_type = other RNA
ttggaagcttaaataactct

SEQ ID NO: 18270 - RNA, 20 nt, synthetic construct
  source 1..20: mol_type = other RNA
ttggacccgataaaatacaa

SEQ ID NO: 18271 - RNA, 20 nt, synthetic construct
  source 1..20: mol_type = other RNA
ttggagagttatttaagctt

SEQ ID NO: 18272 - RNA, 20 nt, synthetic construct
  source 1..20: mol_type = other RNA
ttgggaatatattgcctaat

SEQ ID NO: 18273 - RNA, 20 nt, synthetic construct
  source 1..20: mol_type = other RNA
ttgggctcaaccagttactg

SEQ ID NO: 18274 - RNA, 20 nt, synthetic construct
  source 1..20: mol_type = other RNA
ttggggaatctaatgaagac

SEQ ID NO: 18275 - RNA, 20 nt, synthetic construct
  source 1..20: mol_type = other RNA
ttgtacctaatttcatgagc

SEQ ID NO: 18276 - RNA, 20 nt, synthetic construct
  source 1..20: mol_type = other RNA
ttgtatgcatttaggttttg

SEQ ID NO: 18277 - RNA, 20 nt, synthetic construct
  source 1..20: mol_type = other RNA
ttgtattttatcgggtccaa

SEQ ID NO: 18278 - RNA, 20 nt, synthetic construct
  source 1..20: mol_type = other RNA
ttgtcctcttcttagaaaag

SEQ ID NO: 18279 - RNA, 20 nt, synthetic construct
  source 1..20: mol_type = other RNA
ttgtctgggaggctgtgggg

SEQ ID NO: 18280 - RNA, 20 nt, synthetic construct
  source 1..20: mol_type = other RNA
ttgtgagagcatcactgtaa

SEQ ID NO: 18281 - RNA, 20 nt, synthetic construct
  source 1..20: mol_type = other RNA
ttgtttctttgttttttagc

SEQ ID NO: 18282 - RNA, 20 nt, synthetic construct
  source 1..20: mol_type = other RNA
ttgttttactgtgggcataa

SEQ ID NO: 18283 - RNA, 20 nt, synthetic construct
  source 1..20: mol_type = other RNA
ttgtttttgttttactgtgg

SEQ ID NO: 18284 - RNA, 20 nt, synthetic construct
  source 1..20: mol_type = other RNA
ttgttttttagctcatgaaa

SEQ ID NO: 18285 - RNA, 20 nt, synthetic construct
  source 1..20: mol_type = other RNA
tttaagcttccaaaacttaa

SEQ ID NO: 18286 - RNA, 20 nt, synthetic construct
  source 1..20: mol_type = other RNA
tttaaggtatttgccagctc

SEQ ID NO: 18287 - RNA, 20 nt, synthetic construct
  source 1..20: mol_type = other RNA
tttaattagcatccacaggt

SEQ ID NO: 18288 - RNA, 20 nt, synthetic construct
  source 1..20: mol_type = other RNA
tttacagcaatcacctgtgg

SEQ ID NO: 18289 - RNA, 20 nt, synthetic construct
  source 1..20: mol_type = other RNA
tttactgtgggcataaatta

SEQ ID NO: 18290 - RNA, 20 nt, synthetic construct
  source 1..20: mol_type = other RNA
tttagctcatgaaattaggt

SEQ ID NO: 18291 - RNA, 20 nt, synthetic construct
  source 1..20: mol_type = other RNA
tttaggttttgtttctttgt

SEQ ID NO: 18292 - RNA, 20 nt, synthetic construct
  source 1..20: mol_type = other RNA
tttagtagcactaacacttc

SEQ ID NO: 18293 - RNA, 20 nt, synthetic construct
  source 1..20: mol_type = other RNA
tttagtgatcatgtaccctg

SEQ ID NO: 18294 - RNA, 20 nt, synthetic construct
  source 1..20: mol_type = other RNA
tttagtgtcaatctgtatat

SEQ ID NO: 18295 - RNA, 20 nt, synthetic construct
  source 1..20: mol_type = other RNA
tttatatgccagacccctct

SEQ ID NO: 18296 - RNA, 20 nt, synthetic construct
  source 1..20: mol_type = other RNA
tttatcgggtccaactcaac

SEQ ID NO: 18297 - RNA, 20 nt, synthetic construct
  source 1..20: mol_type = other RNA
tttatgacttttggagagtt

SEQ ID NO: 18298 - RNA, 20 nt, synthetic construct
  source 1..20: mol_type = other RNA
tttatgcccacagtaaaaca

SEQ ID NO: 18299 - RNA, 20 nt, synthetic construct
  source 1..20: mol_type = other RNA
tttcagaaacagtactttcc

SEQ ID NO: 18300 - RNA, 20 nt, synthetic construct
  source 1..20: mol_type = other RNA
tttcagttaagttttggaag

SEQ ID NO: 18301 - RNA, 20 nt, synthetic construct
  source 1..20: mol_type = other RNA
tttcatgagctaaaaaacaa

SEQ ID NO: 18302 - RNA, 20 nt, synthetic construct
  source 1..20: mol_type = other RNA
tttcattgaaaatgaagaga

SEQ ID NO: 18303 - RNA, 20 nt, synthetic construct
  source 1..20: mol_type = other RNA
tttccaaaatgagaggcatg

SEQ ID NO: 18304 - RNA, 20 nt, synthetic construct
  source 1..20: mol_type = other RNA
tttccattatgatcaaatgg

SEQ ID NO: 18305 - RNA, 20 nt, synthetic construct
  source 1..20: mol_type = other RNA
tttccttaatgatagggtgt

SEQ ID NO: 18306 - RNA, 20 nt, synthetic construct
  source 1..20: mol_type = other RNA
tttctaagaagaggacaagt

SEQ ID NO: 18307 - RNA, 20 nt, synthetic construct
  source 1..20: mol_type = other RNA
tttctagagagatatatctg

SEQ ID NO: 18308 - RNA, 20 nt, synthetic construct
  source 1..20: mol_type = other RNA
tttctgaaacattaggcaat

SEQ ID NO: 18309 - RNA, 20 nt, synthetic construct
  source 1..20: mol_type = other RNA
tttcttcccacttccccatg

SEQ ID NO: 18310 - RNA, 20 nt, synthetic construct
  source 1..20: mol_type = other RNA
tttctttgttttttagctca

SEQ ID NO: 18311 - RNA, 20 nt, synthetic construct
  source 1..20: mol_type = other RNA
tttgaatttgggctcaacca

SEQ ID NO: 18312 - RNA, 20 nt, synthetic construct
  source 1..20: mol_type = other RNA
tttgagggaaggcggcaaga

SEQ ID NO: 18313 - RNA, 20 nt, synthetic construct
  source 1..20: mol_type = other RNA
tttgatcataatggaaagta

SEQ ID NO: 18314 - RNA, 20 nt, synthetic construct
  source 1..20: mol_type = other RNA
tttgcatctgagcttctaat

SEQ ID NO: 18315 - RNA, 20 nt, synthetic construct
  source 1..20: mol_type = other RNA
tttgccagctcttgtatgca

SEQ ID NO: 18316 - RNA, 20 nt, synthetic construct
  source 1..20: mol_type = other RNA
tttgccatagtcctcaccta

SEQ ID NO: 18317 - RNA, 20 nt, synthetic construct
  source 1..20: mol_type = other RNA
tttgcgttttaattagcatc

SEQ ID NO: 18318 - RNA, 20 nt, synthetic construct
  source 1..20: mol_type = other RNA
tttggaaagtactgtttctg

SEQ ID NO: 18319 - RNA, 20 nt, synthetic construct
  source 1..20: mol_type = other RNA
tttggaagcttaaataactc

SEQ ID NO: 18320 - RNA, 20 nt, synthetic construct
  source 1..20: mol_type = other RNA
tttggagagttatttaagct

SEQ ID NO: 18321 - RNA, 20 nt, synthetic construct
  source 1..20: mol_type = other RNA
tttgggctcaaccagttact

SEQ ID NO: 18322 - RNA, 20 nt, synthetic construct
  source 1..20: mol_type = other RNA
tttgtacctaatttcatgag

SEQ ID NO: 18323 - RNA, 20 nt, synthetic construct
  source 1..20: mol_type = other RNA
tttgtgagagcatcactgta

SEQ ID NO: 18324 - RNA, 20 nt, synthetic construct
  source 1..20: mol_type = other RNA
tttgttttactgtgggcata

SEQ ID NO: 18325 - RNA, 20 nt, synthetic construct
  source 1..20: mol_type = other RNA
tttgtttttgttttactgtg

SEQ ID NO: 18326 - RNA, 20 nt, synthetic construct
  source 1..20: mol_type = other RNA
tttgttttttagctcatgaa

SEQ ID NO: 18327 - RNA, 20 nt, synthetic construct
  source 1..20: mol_type = other RNA
ttttaattagcatccacagg

SEQ ID NO: 18328 - RNA, 20 nt, synthetic construct
  source 1..20: mol_type = other RNA
ttttactgtgggcataaatt

SEQ ID NO: 18329 - RNA, 20 nt, synthetic construct
  source 1..20: mol_type = other RNA
ttttagctcatgaaattagg

SEQ ID NO: 18330 - RNA, 20 nt, synthetic construct
  source 1..20: mol_type = other RNA
ttttagtgatcatgtaccct

SEQ ID NO: 18331 - RNA, 20 nt, synthetic construct
  source 1..20: mol_type = other RNA
ttttatcgggtccaactcaa

SEQ ID NO: 18332 - RNA, 20 nt, synthetic construct
  source 1..20: mol_type = other RNA
ttttcagttaagttttggaa

SEQ ID NO: 18333 - RNA, 20 nt, synthetic construct
  source 1..20: mol_type = other RNA
ttttcattgaaaatgaagag

SEQ ID NO: 18334 - RNA, 20 nt, synthetic construct
  source 1..20: mol_type = other RNA
ttttctaagaagaggacaag

SEQ ID NO: 18335 - RNA, 20 nt, synthetic construct
  source 1..20: mol_type = other RNA
ttttcttcccacttccccat

SEQ ID NO: 18336 - RNA, 20 nt, synthetic construct
  source 1..20: mol_type = other RNA
ttttggaaagtactgtttct

SEQ ID NO: 18337 - RNA, 20 nt, synthetic construct
  source 1..20: mol_type = other RNA
ttttggaagcttaaataact

SEQ ID NO: 18338 - RNA, 20 nt, synthetic construct
  source 1..20: mol_type = other RNA
ttttggagagttatttaagc

SEQ ID NO: 18339 - RNA, 20 nt, synthetic construct
  source 1..20: mol_type = other RNA
ttttgtgagagcatcactgt

SEQ ID NO: 18340 - RNA, 20 nt, synthetic construct
  source 1..20: mol_type = other RNA
ttttgttttactgtgggcat

SEQ ID NO: 18341 - RNA, 20 nt, synthetic construct
  source 1..20: mol_type = other RNA
tttttagctcatgaaattag

SEQ ID NO: 18342 - RNA, 20 nt, synthetic construct
  source 1..20: mol_type = other RNA
tttttcagttaagttttgga

SEQ ID NO: 18343 - RNA, 20 nt, synthetic construct
  source 1..20: mol_type = other RNA
tttttgttttactgtgggca

SEQ ID NO: 18344 - RNA, 21 nt, synthetic construct
  source 1..21: mol_type = other RNA
aaaaaatcaggtcttcattag

SEQ ID NO: 18345 - RNA, 21 nt, synthetic construct
  source 1..21: mol_type = other RNA
aaaaatcaggtcttcattaga

SEQ ID NO: 18346 - RNA, 21 nt, synthetic construct
  source 1..21: mol_type = other RNA
aaaacaaaaacaaaacccaca

SEQ ID NO: 18347 - RNA, 21 nt, synthetic construct
  source 1..21: mol_type = other RNA
aaaacctaaatgcatacaaga

SEQ ID NO: 18348 - RNA, 21 nt, synthetic construct
  source 1..21: mol_type = other RNA
aaaacgcaaatcccactgtca

SEQ ID NO: 18349 - RNA, 21 nt, synthetic construct
  source 1..21: mol_type = other RNA
aaaagattacagtgatgctct

SEQ ID NO: 18350 - RNA, 21 nt, synthetic construct
  source 1..21: mol_type = other RNA
aaaagctaagagagctctttg

SEQ ID NO: 18351 - RNA, 21 nt, synthetic construct
  source 1..21: mol_type = other RNA
aaaaggcagctactcctcctt

SEQ ID NO: 18352 - RNA, 21 nt, synthetic construct
  source 1..21: mol_type = other RNA
aaaagtcataaagccagtaac

SEQ ID NO: 18353 - RNA, 21 nt, synthetic construct
  source 1..21: mol_type = other RNA
aaaatacaacagggataggtg

SEQ ID NO: 18354 - RNA, 21 nt, synthetic construct
  source 1..21: mol_type = other RNA
aaaatcaggtcttcattagat

SEQ ID NO: 18355 - RNA, 21 nt, synthetic construct
  source 1..21: mol_type = other RNA
aaaatcttgccgccttccctc

SEQ ID NO: 18356 - RNA, 21 nt, synthetic construct
  source 1..21: mol_type = other RNA
aaaatgaagagaagtgttagt

SEQ ID NO: 18357 - RNA, 21 nt, synthetic construct
  source 1..21: mol_type = other RNA
aaaatgagaggcatgactaga

SEQ ID NO: 18358 - RNA, 21 nt, synthetic construct
  source 1..21: mol_type = other RNA
aaaattaatttatgcccacag

SEQ ID NO: 18359 - RNA, 21 nt, synthetic construct
  source 1..21: mol_type = other RNA
aaacaaaaacaaaacccacac

SEQ ID NO: 18360 - RNA, 21 nt, synthetic construct
  source 1..21: mol_type = other RNA
aaacaaaacctaaatgcatac

SEQ ID NO: 18361 - RNA, 21 nt, synthetic construct
  source 1..21: mol_type = other RNA
aaacaccctatcattaaggaa

SEQ ID NO: 18362 - RNA, 21 nt, synthetic construct
  source 1..21: mol_type = other RNA
aaacagagagttccaggcagg

SEQ ID NO: 18363 - RNA, 21 nt, synthetic construct
  source 1..21: mol_type = other RNA
aaacagtactttccaaaatga

SEQ ID NO: 18364 - RNA, 21 nt, synthetic construct
  source 1..21: mol_type = other RNA
aaacattaggcaatatattcc

SEQ ID NO: 18365 - RNA, 21 nt, synthetic construct
  source 1..21: mol_type = other RNA
aaacccagcctgtctgatact

SEQ ID NO: 18366 - RNA, 21 nt, synthetic construct
  source 1..21: mol_type = other RNA
aaacctaaatgcatacaagag

SEQ ID NO: 18367 - RNA, 21 nt, synthetic construct
  source 1..21: mol_type = other RNA
aaacgcaaatcccactgtcac

SEQ ID NO: 18368 - RNA, 21 nt, synthetic construct
  source 1..21: mol_type = other RNA
aaactagccaggttgggaata

SEQ ID NO: 18369 - RNA, 21 nt, synthetic construct
  source 1..21: mol_type = other RNA
aaagaaacaaaacctaaatgc

SEQ ID NO: 18370 - RNA, 21 nt, synthetic construct
  source 1..21: mol_type = other RNA
aaagagctctcttagctttta

SEQ ID NO: 18371 - RNA, 21 nt, synthetic construct
  source 1..21: mol_type = other RNA
aaagattacagtgatgctctc

SEQ ID NO: 18372 - RNA, 21 nt, synthetic construct
  source 1..21: mol_type = other RNA
aaagccagtaactggttgagc

SEQ ID NO: 18373 - RNA, 21 nt, synthetic construct
  source 1..21: mol_type = other RNA
aaagctaagagagctctttgc

SEQ ID NO: 18374 - RNA, 21 nt, synthetic construct
  source 1..21: mol_type = other RNA
aaaggcagctactcctccttg

SEQ ID NO: 18375 - RNA, 21 nt, synthetic construct
  source 1..21: mol_type = other RNA
aaaggctactagccccatcaa

SEQ ID NO: 18376 - RNA, 21 nt, synthetic construct
  source 1..21: mol_type = other RNA
aaagtactgtttctgaaacat

SEQ ID NO: 18377 - RNA, 21 nt, synthetic construct
  source 1..21: mol_type = other RNA
aaagtatgttctgtcccattt

SEQ ID NO: 18378 - RNA, 21 nt, synthetic construct
  source 1..21: mol_type = other RNA
aaagtcataaagccagtaact

SEQ ID NO: 18379 - RNA, 21 nt, synthetic construct
  source 1..21: mol_type = other RNA
aaataactctccaaaagtcat

SEQ ID NO: 18380 - RNA, 21 nt, synthetic construct
  source 1..21: mol_type = other RNA
aaatacaacagggataggtga

SEQ ID NO: 18381 - RNA, 21 nt, synthetic construct
  source 1..21: mol_type = other RNA
aaatacacttatattcagggt

SEQ ID NO: 18382 - RNA, 21 nt, synthetic construct
  source 1..21: mol_type = other RNA
aaataccttaaatggttgagt

SEQ ID NO: 18383 - RNA, 21 nt, synthetic construct
  source 1..21: mol_type = other RNA
aaatcaggtcttcattagatt

SEQ ID NO: 18384 - RNA, 21 nt, synthetic construct
  source 1..21: mol_type = other RNA
aaatcccactgtcacatgcat

SEQ ID NO: 18385 - RNA, 21 nt, synthetic construct
  source 1..21: mol_type = other RNA
aaatcttgccgccttccctca

SEQ ID NO: 18386 - RNA, 21 nt, synthetic construct
  source 1..21: mol_type = other RNA
aaatgaagagaagtgttagtg

SEQ ID NO: 18387 - RNA, 21 nt, synthetic construct
  source 1..21: mol_type = other RNA
aaatgagaggcatgactagac

SEQ ID NO: 18388 - RNA, 21 nt, synthetic construct
  source 1..21: mol_type = other RNA
aaatgcatacaagagctggca

SEQ ID NO: 18389 - RNA, 21 nt, synthetic construct
  source 1..21: mol_type = other RNA
aaatgcctcagggatcagagc

SEQ ID NO: 18390 - RNA, 21 nt, synthetic construct
  source 1..21: mol_type = other RNA
aaatggagtaatgcatgtgac

SEQ ID NO: 18391 - RNA, 21 nt, synthetic construct
  source 1..21: mol_type = other RNA
aaatgggacagaacatacttt

SEQ ID NO: 18392 - RNA, 21 nt, synthetic construct
  source 1..21: mol_type = other RNA
aaatggttgagttggacccga

SEQ ID NO: 18393 - RNA, 21 nt, synthetic construct
  source 1..21: mol_type = other RNA
aaattaatttatgcccacagt

SEQ ID NO: 18394 - RNA, 21 nt, synthetic construct
  source 1..21: mol_type = other RNA
aaattaggtacaaagtcagag

SEQ ID NO: 18395 - RNA, 21 nt, synthetic construct
  source 1..21: mol_type = other RNA
aaattcaaacccagcctgtct

SEQ ID NO: 18396 - RNA, 21 nt, synthetic construct
  source 1..21: mol_type = other RNA
aacaaaaacaaaacccacaca

SEQ ID NO: 18397 - RNA, 21 nt, synthetic construct
  source 1..21: mol_type = other RNA
aacaaaacctaaatgcataca

SEQ ID NO: 18398 - RNA, 21 nt, synthetic construct
  source 1..21: mol_type = other RNA
aacaccctatcattaaggaaa

SEQ ID NO: 18399 - RNA, 21 nt, synthetic construct
  source 1..21: mol_type = other RNA
aacacttctcttcattttcaa

SEQ ID NO: 18400 - RNA, 21 nt, synthetic construct
  source 1..21: mol_type = other RNA
aacagagagttccaggcagga

SEQ ID NO: 18401 - RNA, 21 nt, synthetic construct
  source 1..21: mol_type = other RNA
aacagggataggtgaggacta

SEQ ID NO: 18402 - RNA, 21 nt, synthetic construct
  source 1..21: mol_type = other RNA
aacagtactttccaaaatgag

SEQ ID NO: 18403 - RNA, 21 nt, synthetic construct
  source 1..21: mol_type = other RNA
aacatactttccattatgatc

SEQ ID NO: 18404 - RNA, 21 nt, synthetic construct
  source 1..21: mol_type = other RNA
aacatattaaatgcctcaggg

SEQ ID NO: 18405 - RNA, 21 nt, synthetic construct
  source 1..21: mol_type = other RNA
aacattaaaagctaagagagc

SEQ ID NO: 18406 - RNA, 21 nt, synthetic construct
  source 1..21: mol_type = other RNA
aacattaggcaatatattccc

SEQ ID NO: 18407 - RNA, 21 nt, synthetic construct
  source 1..21: mol_type = other RNA
aaccagttactggctttatga

SEQ ID NO: 18408 - RNA, 21 nt, synthetic construct
  source 1..21: mol_type = other RNA
aaccatttaaggtatttgcca

SEQ ID NO: 18409 - RNA, 21 nt, synthetic construct
  source 1..21: mol_type = other RNA
aacccagcctgtctgatactt

SEQ ID NO: 18410 - RNA, 21 nt, synthetic construct
  source 1..21: mol_type = other RNA
aacctaaatgcatacaagagc

SEQ ID NO: 18411 - RNA, 21 nt, synthetic construct
  source 1..21: mol_type = other RNA
aacctggctagtttacagcaa

SEQ ID NO: 18412 - RNA, 21 nt, synthetic construct
  source 1..21: mol_type = other RNA
aacgcaaatcccactgtcaca

SEQ ID NO: 18413 - RNA, 21 nt, synthetic construct
  source 1..21: mol_type = other RNA
aactagccaggttgggaatat

SEQ ID NO: 18414 - RNA, 21 nt, synthetic construct
  source 1..21: mol_type = other RNA
aactcaaccatttaaggtatt

SEQ ID NO: 18415 - RNA, 21 nt, synthetic construct
  source 1..21: mol_type = other RNA
aactctccaaaagtcataaag

SEQ ID NO: 18416 - RNA, 21 nt, synthetic construct
  source 1..21: mol_type = other RNA
aactctctgtttgagggaagg

SEQ ID NO: 18417 - RNA, 21 nt, synthetic construct
  source 1..21: mol_type = other RNA
aactggttgagcccaaattca

SEQ ID NO: 18418 - RNA, 21 nt, synthetic construct
  source 1..21: mol_type = other RNA
aagaaacaaaacctaaatgca

SEQ ID NO: 18419 - RNA, 21 nt, synthetic construct
  source 1..21: mol_type = other RNA
aagaacatattaaatgcctca

SEQ ID NO: 18420 - RNA, 21 nt, synthetic construct
  source 1..21: mol_type = other RNA
aagaagaggacaagtatcaga

SEQ ID NO: 18421 - RNA, 21 nt, synthetic construct
  source 1..21: mol_type = other RNA
aagagaagtgttagtgctact

SEQ ID NO: 18422 - RNA, 21 nt, synthetic construct
  source 1..21: mol_type = other RNA
aagagagctctttgcatctga

SEQ ID NO: 18423 - RNA, 21 nt, synthetic construct
  source 1..21: mol_type = other RNA
aagagctctcttagcttttaa

SEQ ID NO: 18424 - RNA, 21 nt, synthetic construct
  source 1..21: mol_type = other RNA
aagagctggcaaataccttaa

SEQ ID NO: 18425 - RNA, 21 nt, synthetic construct
  source 1..21: mol_type = other RNA
aagaggacaagtatcagacag

SEQ ID NO: 18426 - RNA, 21 nt, synthetic construct
  source 1..21: mol_type = other RNA
aagaggtggattggggaatct

SEQ ID NO: 18427 - RNA, 21 nt, synthetic construct
  source 1..21: mol_type = other RNA
aagattacagtgatgctctca

SEQ ID NO: 18428 - RNA, 21 nt, synthetic construct
  source 1..21: mol_type = other RNA
aagattttgtgagagcatcac

SEQ ID NO: 18429 - RNA, 21 nt, synthetic construct
  source 1..21: mol_type = other RNA
aagccagtaactggttgagcc

SEQ ID NO: 18430 - RNA, 21 nt, synthetic construct
  source 1..21: mol_type = other RNA
aagctaagagagctctttgca

SEQ ID NO: 18431 - RNA, 21 nt, synthetic construct
  source 1..21: mol_type = other RNA
aagctcagatgcaaagagctc

SEQ ID NO: 18432 - RNA, 21 nt, synthetic construct
  source 1..21: mol_type = other RNA
aagcttaaataactctccaaa

SEQ ID NO: 18433 - RNA, 21 nt, synthetic construct
  source 1..21: mol_type = other RNA
aagcttccaaaacttaactga

SEQ ID NO: 18434 - RNA, 21 nt, synthetic construct
  source 1..21: mol_type = other RNA
aaggaaaggctactagcccca

SEQ ID NO: 18435 - RNA, 21 nt, synthetic construct
  source 1..21: mol_type = other RNA
aaggaggagtaccaggccacc

SEQ ID NO: 18436 - RNA, 21 nt, synthetic construct
  source 1..21: mol_type = other RNA
aaggaggagtagctgcctttt

SEQ ID NO: 18437 - RNA, 21 nt, synthetic construct
  source 1..21: mol_type = other RNA
aaggcagctactcctccttgt

SEQ ID NO: 18438 - RNA, 21 nt, synthetic construct
  source 1..21: mol_type = other RNA
aaggcggcaagattttgtgag

SEQ ID NO: 18439 - RNA, 21 nt, synthetic construct
  source 1..21: mol_type = other RNA
aaggctactagccccatcaag

SEQ ID NO: 18440 - RNA, 21 nt, synthetic construct
  source 1..21: mol_type = other RNA
aaggtatttgccagctcttgt

SEQ ID NO: 18441 - RNA, 21 nt, synthetic construct
  source 1..21: mol_type = other RNA
aaggtggcctggtactcctcc

SEQ ID NO: 18442 - RNA, 21 nt, synthetic construct
  source 1..21: mol_type = other RNA
aagtactgtttctgaaacatt

SEQ ID NO: 18443 - RNA, 21 nt, synthetic construct
  source 1..21: mol_type = other RNA
aagtatcagacaggctgggtt

SEQ ID NO: 18444 - RNA, 21 nt, synthetic construct
  source 1..21: mol_type = other RNA
aagtatgttctgtcccatttg

SEQ ID NO: 18445 - RNA, 21 nt, synthetic construct
  source 1..21: mol_type = other RNA
aagtcataaagccagtaactg

SEQ ID NO: 18446 - RNA, 21 nt, synthetic construct
  source 1..21: mol_type = other RNA
aagtgttagtgctactaaata

SEQ ID NO: 18447 - RNA, 21 nt, synthetic construct
  source 1..21: mol_type = other RNA
aataactctccaaaagtcata

SEQ ID NO: 18448 - RNA, 21 nt, synthetic construct
  source 1..21: mol_type = other RNA
aatacaacagggataggtgag

SEQ ID NO: 18449 - RNA, 21 nt, synthetic construct
  source 1..21: mol_type = other RNA
aatacacttatattcagggta

SEQ ID NO: 18450 - RNA, 21 nt, synthetic construct
  source 1..21: mol_type = other RNA
aataccttaaatggttgagtt

SEQ ID NO: 18451 - RNA, 21 nt, synthetic construct
  source 1..21: mol_type = other RNA
aatatattcccaacctggcta

SEQ ID NO: 18452 - RNA, 21 nt, synthetic construct
  source 1..21: mol_type = other RNA
aatattttcttcccacttccc

SEQ ID NO: 18453 - RNA, 21 nt, synthetic construct
  source 1..21: mol_type = other RNA
aatcacctgtggatgctaatt

SEQ ID NO: 18454 - RNA, 21 nt, synthetic construct
  source 1..21: mol_type = other RNA
aatcaggtcttcattagattc

SEQ ID NO: 18455 - RNA, 21 nt, synthetic construct
  source 1..21: mol_type = other RNA
aatccacctcttgatggggct

SEQ ID NO: 18456 - RNA, 21 nt, synthetic construct
  source 1..21: mol_type = other RNA
aatcccactgtcacatgcatt

SEQ ID NO: 18457 - RNA, 21 nt, synthetic construct
  source 1..21: mol_type = other RNA
aatctaatgaagacctgattt

SEQ ID NO: 18458 - RNA, 21 nt, synthetic construct
  source 1..21: mol_type = other RNA
aatctgtatatttagtagcac

SEQ ID NO: 18459 - RNA, 21 nt, synthetic construct
  source 1..21: mol_type = other RNA
aatctgtgctctgatccctga

SEQ ID NO: 18460 - RNA, 21 nt, synthetic construct
  source 1..21: mol_type = other RNA
aatcttgccgccttccctcaa

SEQ ID NO: 18461 - RNA, 21 nt, synthetic construct
  source 1..21: mol_type = other RNA
aatcttttctaagaagaggac

SEQ ID NO: 18462 - RNA, 21 nt, synthetic construct
  source 1..21: mol_type = other RNA
aatgaagagaagtgttagtgc

SEQ ID NO: 18463 - RNA, 21 nt, synthetic construct
  source 1..21: mol_type = other RNA
aatgagaggcatgactagacc

SEQ ID NO: 18464 - RNA, 21 nt, synthetic construct
  source 1..21: mol_type = other RNA
aatgatagggtgtttctagag

SEQ ID NO: 18465 - RNA, 21 nt, synthetic construct
  source 1..21: mol_type = other RNA
aatgcatacaagagctggcaa

SEQ ID NO: 18466 - RNA, 21 nt, synthetic construct
  source 1..21: mol_type = other RNA
aatgcatgtgacagtgggatt

SEQ ID NO: 18467 - RNA, 21 nt, synthetic construct
  source 1..21: mol_type = other RNA
aatgcctcagggatcagagca

SEQ ID NO: 18468 - RNA, 21 nt, synthetic construct
  source 1..21: mol_type = other RNA
aatggaaagtatgttctgtcc

SEQ ID NO: 18469 - RNA, 21 nt, synthetic construct
  source 1..21: mol_type = other RNA
aatggagtaatgcatgtgaca

SEQ ID NO: 18470 - RNA, 21 nt, synthetic construct
  source 1..21: mol_type = other RNA
aatgggacagaacatactttc

SEQ ID NO: 18471 - RNA, 21 nt, synthetic construct
  source 1..21: mol_type = other RNA
aatggttgagttggacccgat

SEQ ID NO: 18472 - RNA, 21 nt, synthetic construct
  source 1..21: mol_type = other RNA
aatgtttcagaaacagtactt

SEQ ID NO: 18473 - RNA, 21 nt, synthetic construct
  source 1..21: mol_type = other RNA
aattaaaacgcaaatcccact

SEQ ID NO: 18474 - RNA, 21 nt, synthetic construct
  source 1..21: mol_type = other RNA
aattaatttatgcccacagta

SEQ ID NO: 18475 - RNA, 21 nt, synthetic construct
  source 1..21: mol_type = other RNA
aattagcatccacaggtgatt

SEQ ID NO: 18476 - RNA, 21 nt, synthetic construct
  source 1..21: mol_type = other RNA
aattaggtacaaagtcagaga

SEQ ID NO: 18477 - RNA, 21 nt, synthetic construct
  source 1..21: mol_type = other RNA
aattcaaacccagcctgtctg

SEQ ID NO: 18478 - RNA, 21 nt, synthetic construct
  source 1..21: mol_type = other RNA
aatttatgcccacagtaaaac

SEQ ID NO: 18479 - RNA, 21 nt, synthetic construct
  source 1..21: mol_type = other RNA
aatttgggctcaaccagttac

SEQ ID NO: 18480 - RNA, 21 nt, synthetic construct
  source 1..21: mol_type = other RNA
acaaaaacaaaacccacacac

SEQ ID NO: 18481 - RNA, 21 nt, synthetic construct
  source 1..21: mol_type = other RNA
acaaaacctaaatgcatacaa

SEQ ID NO: 18482 - RNA, 21 nt, synthetic construct
  source 1..21: mol_type = other RNA
acaaaatcttgccgccttccc

SEQ ID NO: 18483 - RNA, 21 nt, synthetic construct
  source 1..21: mol_type = other RNA
acaaagtcagagaggggtctg

SEQ ID NO: 18484 - RNA, 21 nt, synthetic construct
  source 1..21: mol_type = other RNA
acaacagggataggtgaggac

SEQ ID NO: 18485 - RNA, 21 nt, synthetic construct
  source 1..21: mol_type = other RNA
acaagagctggcaaatacctt

SEQ ID NO: 18486 - RNA, 21 nt, synthetic construct
  source 1..21: mol_type = other RNA
acaaggaggagtagctgcctt

SEQ ID NO: 18487 - RNA, 21 nt, synthetic construct
  source 1..21: mol_type = other RNA
acaagtatcagacaggctggg

SEQ ID NO: 18488 - RNA, 21 nt, synthetic construct
  source 1..21: mol_type = other RNA
acaccctatcattaaggaaag

SEQ ID NO: 18489 - RNA, 21 nt, synthetic construct
  source 1..21: mol_type = other RNA
acacttatattcagggtacat

SEQ ID NO: 18490 - RNA, 21 nt, synthetic construct
  source 1..21: mol_type = other RNA
acacttctcttcattttcaat

SEQ ID NO: 18491 - RNA, 21 nt, synthetic construct
  source 1..21: mol_type = other RNA
acagaacatactttccattat

SEQ ID NO: 18492 - RNA, 21 nt, synthetic construct
  source 1..21: mol_type = other RNA
acagagagttccaggcaggat

SEQ ID NO: 18493 - RNA, 21 nt, synthetic construct
  source 1..21: mol_type = other RNA
acagattcatcctgcctggaa

SEQ ID NO: 18494 - RNA, 21 nt, synthetic construct
  source 1..21: mol_type = other RNA
acagcaatcacctgtggatgc

SEQ ID NO: 18495 - RNA, 21 nt, synthetic construct
  source 1..21: mol_type = other RNA
acagcctcccagacaaggagg

SEQ ID NO: 18496 - RNA, 21 nt, synthetic construct
  source 1..21: mol_type = other RNA
acaggctgggtttgaatttgg

SEQ ID NO: 18497 - RNA, 21 nt, synthetic construct
  source 1..21: mol_type = other RNA
acagggataggtgaggactat

SEQ ID NO: 18498 - RNA, 21 nt, synthetic construct
  source 1..21: mol_type = other RNA
acaggtgattgctgtaaacta

SEQ ID NO: 18499 - RNA, 21 nt, synthetic construct
  source 1..21: mol_type = other RNA
acagtactttccaaaatgaga

SEQ ID NO: 18500 - RNA, 21 nt, synthetic construct
  source 1..21: mol_type = other RNA
acagtgatgctctcacaaaat

SEQ ID NO: 18501 - RNA, 21 nt, synthetic construct
  source 1..21: mol_type = other RNA
acagtgggatttgcgttttaa

SEQ ID NO: 18502 - RNA, 21 nt, synthetic construct
  source 1..21: mol_type = other RNA
acatactttccattatgatca

SEQ ID NO: 18503 - RNA, 21 nt, synthetic construct
  source 1..21: mol_type = other RNA
acatattaaatgcctcaggga

SEQ ID NO: 18504 - RNA, 21 nt, synthetic construct
  source 1..21: mol_type = other RNA
acatgatcactaaaaggcagc

SEQ ID NO: 18505 - RNA, 21 nt, synthetic construct
  source 1..21: mol_type = other RNA
acatgcattactccatttgat

SEQ ID NO: 18506 - RNA, 21 nt, synthetic construct
  source 1..21: mol_type = other RNA
acattaaaagctaagagagct

SEQ ID NO: 18507 - RNA, 21 nt, synthetic construct
  source 1..21: mol_type = other RNA
acattaggcaatatattccca

SEQ ID NO: 18508 - RNA, 21 nt, synthetic construct
  source 1..21: mol_type = other RNA
accagatatatctctctagaa

SEQ ID NO: 18509 - RNA, 21 nt, synthetic construct
  source 1..21: mol_type = other RNA
accaggccaccttgaccagat

SEQ ID NO: 18510 - RNA, 21 nt, synthetic construct
  source 1..21: mol_type = other RNA
accagttactggctttatgac

SEQ ID NO: 18511 - RNA, 21 nt, synthetic construct
  source 1..21: mol_type = other RNA
accatccatggggaagtggga

SEQ ID NO: 18512 - RNA, 21 nt, synthetic construct
  source 1..21: mol_type = other RNA
accatttaaggtatttgccag

SEQ ID NO: 18513 - RNA, 21 nt, synthetic construct
  source 1..21: mol_type = other RNA
acccagcctgtctgatacttg

SEQ ID NO: 18514 - RNA, 21 nt, synthetic construct
  source 1..21: mol_type = other RNA
acccctctctgactttgtacc

SEQ ID NO: 18515 - RNA, 21 nt, synthetic construct
  source 1..21: mol_type = other RNA
acccgataaaatacaacaggg

SEQ ID NO: 18516 - RNA, 21 nt, synthetic construct
  source 1..21: mol_type = other RNA
accctatcattaaggaaaggc

SEQ ID NO: 18517 - RNA, 21 nt, synthetic construct
  source 1..21: mol_type = other RNA
accctgaatataagtgtattt

SEQ ID NO: 18518 - RNA, 21 nt, synthetic construct
  source 1..21: mol_type = other RNA
acctaaatgcatacaagagct

SEQ ID NO: 18519 - RNA, 21 nt, synthetic construct
  source 1..21: mol_type = other RNA
acctaatttcatgagctaaaa

SEQ ID NO: 18520 - RNA, 21 nt, synthetic construct
  source 1..21: mol_type = other RNA
acctatccctgttgtatttta

SEQ ID NO: 18521 - RNA, 21 nt, synthetic construct
  source 1..21: mol_type = other RNA
acctcttgatggggctagtag

SEQ ID NO: 18522 - RNA, 21 nt, synthetic construct
  source 1..21: mol_type = other RNA
acctggctagtttacagcaat

SEQ ID NO: 18523 - RNA, 21 nt, synthetic construct
  source 1..21: mol_type = other RNA
acctgtggatgctaattaaaa

SEQ ID NO: 18524 - RNA, 21 nt, synthetic construct
  source 1..21: mol_type = other RNA
acctgtgtgtgggttttgttt

SEQ ID NO: 18525 - RNA, 21 nt, synthetic construct
  source 1..21: mol_type = other RNA
accttaaatggttgagttgga

SEQ ID NO: 18526 - RNA, 21 nt, synthetic construct
  source 1..21: mol_type = other RNA
accttgaccagatatatctct

SEQ ID NO: 18527 - RNA, 21 nt, synthetic construct
  source 1..21: mol_type = other RNA
acgcaaatcccactgtcacat

SEQ ID NO: 18528 - RNA, 21 nt, synthetic construct
  source 1..21: mol_type = other RNA
actaaaaggcagctactcctc

SEQ ID NO: 18529 - RNA, 21 nt, synthetic construct
  source 1..21: mol_type = other RNA
actaaatatacagattgacac

SEQ ID NO: 18530 - RNA, 21 nt, synthetic construct
  source 1..21: mol_type = other RNA
actaacacttctcttcatttt

SEQ ID NO: 18531 - RNA, 21 nt, synthetic construct
  source 1..21: mol_type = other RNA
actagaccatccatggggaag

SEQ ID NO: 18532 - RNA, 21 nt, synthetic construct
  source 1..21: mol_type = other RNA
actagccaggttgggaatata

SEQ ID NO: 18533 - RNA, 21 nt, synthetic construct
  source 1..21: mol_type = other RNA
actagccccatcaagaggtgg

SEQ ID NO: 18534 - RNA, 21 nt, synthetic construct
  source 1..21: mol_type = other RNA
actatggcaaatgggacagaa

SEQ ID NO: 18535 - RNA, 21 nt, synthetic construct
  source 1..21: mol_type = other RNA
actcaaccatttaaggtattt

SEQ ID NO: 18536 - RNA, 21 nt, synthetic construct
  source 1..21: mol_type = other RNA
actccatttgatcataatgga

SEQ ID NO: 18537 - RNA, 21 nt, synthetic construct
  source 1..21: mol_type = other RNA
actcctccttctccccacagc

SEQ ID NO: 18538 - RNA, 21 nt, synthetic construct
  source 1..21: mol_type = other RNA
actcctccttgtctgggaggc

SEQ ID NO: 18539 - RNA, 21 nt, synthetic construct
  source 1..21: mol_type = other RNA
actctccaaaagtcataaagc

SEQ ID NO: 18540 - RNA, 21 nt, synthetic construct
  source 1..21: mol_type = other RNA
actctctgtttgagggaaggc

SEQ ID NO: 18541 - RNA, 21 nt, synthetic construct
  source 1..21: mol_type = other RNA
actggctttatgacttttgga

SEQ ID NO: 18542 - RNA, 21 nt, synthetic construct
  source 1..21: mol_type = other RNA
actggttgagcccaaattcaa

SEQ ID NO: 18543 - RNA, 21 nt, synthetic construct
  source 1..21: mol_type = other RNA
actgtaatcttttctaagaag

SEQ ID NO: 18544 - RNA, 21 nt, synthetic construct
  source 1..21: mol_type = other RNA
actgtcacatgcattactcca

SEQ ID NO: 18545 - RNA, 21 nt, synthetic construct
  source 1..21: mol_type = other RNA
actgtgggcataaattaattt

SEQ ID NO: 18546 - RNA, 21 nt, synthetic construct
  source 1..21: mol_type = other RNA
actgtttctgaaacattaggc

SEQ ID NO: 18547 - RNA, 21 nt, synthetic construct
  source 1..21: mol_type = other RNA
acttatattcagggtacatga

SEQ ID NO: 18548 - RNA, 21 nt, synthetic construct
  source 1..21: mol_type = other RNA
acttccccatggatggtctag

SEQ ID NO: 18549 - RNA, 21 nt, synthetic construct
  source 1..21: mol_type = other RNA
acttctcttcattttcaatga

SEQ ID NO: 18550 - RNA, 21 nt, synthetic construct
  source 1..21: mol_type = other RNA
acttgtcctcttcttagaaaa

SEQ ID NO: 18551 - RNA, 21 nt, synthetic construct
  source 1..21: mol_type = other RNA
actttccaaaatgagaggcat

SEQ ID NO: 18552 - RNA, 21 nt, synthetic construct
  source 1..21: mol_type = other RNA
actttccattatgatcaaatg

SEQ ID NO: 18553 - RNA, 21 nt, synthetic construct
  source 1..21: mol_type = other RNA
actttgtacctaatttcatga

SEQ ID NO: 18554 - RNA, 21 nt, synthetic construct
  source 1..21: mol_type = other RNA
acttttggagagttatttaag

SEQ ID NO: 18555 - RNA, 21 nt, synthetic construct
  source 1..21: mol_type = other RNA
agaaaagattacagtgatgct

SEQ ID NO: 18556 - RNA, 21 nt, synthetic construct
  source 1..21: mol_type = other RNA
agaaacaaaacctaaatgcat

SEQ ID NO: 18557 - RNA, 21 nt, synthetic construct
  source 1..21: mol_type = other RNA
agaaacaccctatcattaagg

SEQ ID NO: 18558 - RNA, 21 nt, synthetic construct
  source 1..21: mol_type = other RNA
agaaacagtactttccaaaat

SEQ ID NO: 18559 - RNA, 21 nt, synthetic construct
  source 1..21: mol_type = other RNA
agaacatactttccattatga

SEQ ID NO: 18560 - RNA, 21 nt, synthetic construct
  source 1..21: mol_type = other RNA
agaacatattaaatgcctcag

SEQ ID NO: 18561 - RNA, 21 nt, synthetic construct
  source 1..21: mol_type = other RNA
agaagaggacaagtatcagac

SEQ ID NO: 18562 - RNA, 21 nt, synthetic construct
  source 1..21: mol_type = other RNA
agaagctcagatgcaaagagc

SEQ ID NO: 18563 - RNA, 21 nt, synthetic construct
  source 1..21: mol_type = other RNA
agaaggaggagtaccaggcca

SEQ ID NO: 18564 - RNA, 21 nt, synthetic construct
  source 1..21: mol_type = other RNA
agaagtgttagtgctactaaa

SEQ ID NO: 18565 - RNA, 21 nt, synthetic construct
  source 1..21: mol_type = other RNA
agacaaggaggagtagctgcc

SEQ ID NO: 18566 - RNA, 21 nt, synthetic construct
  source 1..21: mol_type = other RNA
agacaggctgggtttgaattt

SEQ ID NO: 18567 - RNA, 21 nt, synthetic construct
  source 1..21: mol_type = other RNA
agaccatccatggggaagtgg

SEQ ID NO: 18568 - RNA, 21 nt, synthetic construct
  source 1..21: mol_type = other RNA
agacccctctctgactttgta

SEQ ID NO: 18569 - RNA, 21 nt, synthetic construct
  source 1..21: mol_type = other RNA
agagaagtgttagtgctacta

SEQ ID NO: 18570 - RNA, 21 nt, synthetic construct
  source 1..21: mol_type = other RNA
agagagatatatctggtcaag

SEQ ID NO: 18571 - RNA, 21 nt, synthetic construct
  source 1..21: mol_type = other RNA
agagagctctttgcatctgag

SEQ ID NO: 18572 - RNA, 21 nt, synthetic construct
  source 1..21: mol_type = other RNA
agagagttccaggcaggatga

SEQ ID NO: 18573 - RNA, 21 nt, synthetic construct
  source 1..21: mol_type = other RNA
agagatatatctggtcaaggt

SEQ ID NO: 18574 - RNA, 21 nt, synthetic construct
  source 1..21: mol_type = other RNA
agagcacagattcatcctgcc

SEQ ID NO: 18575 - RNA, 21 nt, synthetic construct
  source 1..21: mol_type = other RNA
agagcatcactgtaatctttt

SEQ ID NO: 18576 - RNA, 21 nt, synthetic construct
  source 1..21: mol_type = other RNA
agagctctcttagcttttaat

SEQ ID NO: 18577 - RNA, 21 nt, synthetic construct
  source 1..21: mol_type = other RNA
agagctctttgcatctgagct

SEQ ID NO: 18578 - RNA, 21 nt, synthetic construct
  source 1..21: mol_type = other RNA
agagctggcaaataccttaaa

SEQ ID NO: 18579 - RNA, 21 nt, synthetic construct
  source 1..21: mol_type = other RNA
agaggacaagtatcagacagg

SEQ ID NO: 18580 - RNA, 21 nt, synthetic construct
  source 1..21: mol_type = other RNA
agaggcatgactagaccatcc

SEQ ID NO: 18581 - RNA, 21 nt, synthetic construct
  source 1..21: mol_type = other RNA
agaggtggattggggaatcta

SEQ ID NO: 18582 - RNA, 21 nt, synthetic construct
  source 1..21: mol_type = other RNA
agagttatttaagcttccaaa

SEQ ID NO: 18583 - RNA, 21 nt, synthetic construct
  source 1..21: mol_type = other RNA
agagttccaggcaggatgaat

SEQ ID NO: 18584 - RNA, 21 nt, synthetic construct
  source 1..21: mol_type = other RNA
agatatatctctctagaaaca

SEQ ID NO: 18585 - RNA, 21 nt, synthetic construct
  source 1..21: mol_type = other RNA
agatatatctggtcaaggtgg

SEQ ID NO: 18586 - RNA, 21 nt, synthetic construct
  source 1..21: mol_type = other RNA
agatgcaaagagctctcttag

SEQ ID NO: 18587 - RNA, 21 nt, synthetic construct
  source 1..21: mol_type = other RNA
agattacagtgatgctctcac

SEQ ID NO: 18588 - RNA, 21 nt, synthetic construct
  source 1..21: mol_type = other RNA
agattcatcctgcctggaact

SEQ ID NO: 18589 - RNA, 21 nt, synthetic construct
  source 1..21: mol_type = other RNA
agattccccaatccacctctt

SEQ ID NO: 18590 - RNA, 21 nt, synthetic construct
  source 1..21: mol_type = other RNA
agattttgtgagagcatcact

SEQ ID NO: 18591 - RNA, 21 nt, synthetic construct
  source 1..21: mol_type = other RNA
agcaatcacctgtggatgcta

SEQ ID NO: 18592 - RNA, 21 nt, synthetic construct
  source 1..21: mol_type = other RNA
agcacagattcatcctgcctg

SEQ ID NO: 18593 - RNA, 21 nt, synthetic construct
  source 1..21: mol_type = other RNA
agcactaacacttctcttcat

SEQ ID NO: 18594 - RNA, 21 nt, synthetic construct
  source 1..21: mol_type = other RNA
agcatcactgtaatcttttct

SEQ ID NO: 18595 - RNA, 21 nt, synthetic construct
  source 1..21: mol_type = other RNA
agcatccacaggtgattgctg

SEQ ID NO: 18596 - RNA, 21 nt, synthetic construct
  source 1..21: mol_type = other RNA
agccaggttgggaatatattg

SEQ ID NO: 18597 - RNA, 21 nt, synthetic construct
  source 1..21: mol_type = other RNA
agccagtaactggttgagccc

SEQ ID NO: 18598 - RNA, 21 nt, synthetic construct
  source 1..21: mol_type = other RNA
agcccaaattcaaacccagcc

SEQ ID NO: 18599 - RNA, 21 nt, synthetic construct
  source 1..21: mol_type = other RNA
agccccatcaagaggtggatt

SEQ ID NO: 18600 - RNA, 21 nt, synthetic construct
  source 1..21: mol_type = other RNA
agcctcccagacaaggaggag

SEQ ID NO: 18601 - RNA, 21 nt, synthetic construct
  source 1..21: mol_type = other RNA
agcctgtctgatacttgtcct

SEQ ID NO: 18602 - RNA, 21 nt, synthetic construct
  source 1..21: mol_type = other RNA
agcctttccttaatgataggg

SEQ ID NO: 18603 - RNA, 21 nt, synthetic construct
  source 1..21: mol_type = other RNA
agctaagagagctctttgcat

SEQ ID NO: 18604 - RNA, 21 nt, synthetic construct
  source 1..21: mol_type = other RNA
agctactcctccttgtctggg

SEQ ID NO: 18605 - RNA, 21 nt, synthetic construct
  source 1..21: mol_type = other RNA
agctcagatgcaaagagctct

SEQ ID NO: 18606 - RNA, 21 nt, synthetic construct
  source 1..21: mol_type = other RNA
agctcatgaaattaggtacaa

SEQ ID NO: 18607 - RNA, 21 nt, synthetic construct
  source 1..21: mol_type = other RNA
agctctcttagcttttaatgt

SEQ ID NO: 18608 - RNA, 21 nt, synthetic construct
  source 1..21: mol_type = other RNA
agctcttgtatgcatttaggt

SEQ ID NO: 18609 - RNA, 21 nt, synthetic construct
  source 1..21: mol_type = other RNA
agctctttgcatctgagcttc

SEQ ID NO: 18610 - RNA, 21 nt, synthetic construct
  source 1..21: mol_type = other RNA
agctgccttttagtgatcatg

SEQ ID NO: 18611 - RNA, 21 nt, synthetic construct
  source 1..21: mol_type = other RNA
agctggcaaataccttaaatg

SEQ ID NO: 18612 - RNA, 21 nt, synthetic construct
  source 1..21: mol_type = other RNA
agcttaaataactctccaaaa

SEQ ID NO: 18613 - RNA, 21 nt, synthetic construct
  source 1..21: mol_type = other RNA
agcttccaaaacttaactgaa

SEQ ID NO: 18614 - RNA, 21 nt, synthetic construct
  source 1..21: mol_type = other RNA
aggaaaggctactagccccat

SEQ ID NO: 18615 - RNA, 21 nt, synthetic construct
  source 1..21: mol_type = other RNA
aggacaagtatcagacaggct

SEQ ID NO: 18616 - RNA, 21 nt, synthetic construct
  source 1..21: mol_type = other RNA
aggactatggcaaatgggaca

SEQ ID NO: 18617 - RNA, 21 nt, synthetic construct
  source 1..21: mol_type = other RNA
aggaggagtaccaggccacct

SEQ ID NO: 18618 - RNA, 21 nt, synthetic construct
  source 1..21: mol_type = other RNA
aggaggagtagctgcctttta

SEQ ID NO: 18619 - RNA, 21 nt, synthetic construct
  source 1..21: mol_type = other RNA
aggagtaccaggccaccttga

SEQ ID NO: 18620 - RNA, 21 nt, synthetic construct
  source 1..21: mol_type = other RNA
aggagtagctgccttttagtg

SEQ ID NO: 18621 - RNA, 21 nt, synthetic construct
  source 1..21: mol_type = other RNA
aggatgaatctgtgctctgat

SEQ ID NO: 18622 - RNA, 21 nt, synthetic construct
  source 1..21: mol_type = other RNA
aggcaatatattcccaacctg

SEQ ID NO: 18623 - RNA, 21 nt, synthetic construct
  source 1..21: mol_type = other RNA
aggcagctactcctccttgtc

SEQ ID NO: 18624 - RNA, 21 nt, synthetic construct
  source 1..21: mol_type = other RNA
aggcaggatgaatctgtgctc

SEQ ID NO: 18625 - RNA, 21 nt, synthetic construct
  source 1..21: mol_type = other RNA
aggcatgactagaccatccat

SEQ ID NO: 18626 - RNA, 21 nt, synthetic construct
  source 1..21: mol_type = other RNA
aggccaccttgaccagatata

SEQ ID NO: 18627 - RNA, 21 nt, synthetic construct
  source 1..21: mol_type = other RNA
aggcggcaagattttgtgaga

SEQ ID NO: 18628 - RNA, 21 nt, synthetic construct
  source 1..21: mol_type = other RNA
aggctactagccccatcaaga

SEQ ID NO: 18629 - RNA, 21 nt, synthetic construct
  source 1..21: mol_type = other RNA
aggctgggtttgaatttgggc

SEQ ID NO: 18630 - RNA, 21 nt, synthetic construct
  source 1..21: mol_type = other RNA
aggctgtggggagaaggagga

SEQ ID NO: 18631 - RNA, 21 nt, synthetic construct
  source 1..21: mol_type = other RNA
agggaaggcggcaagattttg

SEQ ID NO: 18632 - RNA, 21 nt, synthetic construct
  source 1..21: mol_type = other RNA
agggataggtgaggactatgg

SEQ ID NO: 18633 - RNA, 21 nt, synthetic construct
  source 1..21: mol_type = other RNA
agggatcagagcacagattca

SEQ ID NO: 18634 - RNA, 21 nt, synthetic construct
  source 1..21: mol_type = other RNA
agggtacatgatcactaaaag

SEQ ID NO: 18635 - RNA, 21 nt, synthetic construct
  source 1..21: mol_type = other RNA
agggtgtttctagagagatat

SEQ ID NO: 18636 - RNA, 21 nt, synthetic construct
  source 1..21: mol_type = other RNA
aggtacaaagtcagagagggg

SEQ ID NO: 18637 - RNA, 21 nt, synthetic construct
  source 1..21: mol_type = other RNA
aggtatttgccagctcttgta

SEQ ID NO: 18638 - RNA, 21 nt, synthetic construct
  source 1..21: mol_type = other RNA
aggtcttcattagattcccca

SEQ ID NO: 18639 - RNA, 21 nt, synthetic construct
  source 1..21: mol_type = other RNA
aggtgaggactatggcaaatg

SEQ ID NO: 18640 - RNA, 21 nt, synthetic construct
  source 1..21: mol_type = other RNA
aggtgattgctgtaaactagc

SEQ ID NO: 18641 - RNA, 21 nt, synthetic construct
  source 1..21: mol_type = other RNA
aggtggattggggaatctaat

SEQ ID NO: 18642 - RNA, 21 nt, synthetic construct
  source 1..21: mol_type = other RNA
aggtggcctggtactcctcct

SEQ ID NO: 18643 - RNA, 21 nt, synthetic construct
  source 1..21: mol_type = other RNA
aggttgggaatatattgccta

SEQ ID NO: 18644 - RNA, 21 nt, synthetic construct
  source 1..21: mol_type = other RNA
agtaaaacaaaaacaaaaccc

SEQ ID NO: 18645 - RNA, 21 nt, synthetic construct
  source 1..21: mol_type = other RNA
agtaactggttgagcccaaat

SEQ ID NO: 18646 - RNA, 21 nt, synthetic construct
  source 1..21: mol_type = other RNA
agtaatgcatgtgacagtggg

SEQ ID NO: 18647 - RNA, 21 nt, synthetic construct
  source 1..21: mol_type = other RNA
agtaccaggccaccttgacca

SEQ ID NO: 18648 - RNA, 21 nt, synthetic construct
  source 1..21: mol_type = other RNA
agtactgtttctgaaacatta

SEQ ID NO: 18649 - RNA, 21 nt, synthetic construct
  source 1..21: mol_type = other RNA
agtactttccaaaatgagagg

SEQ ID NO: 18650 - RNA, 21 nt, synthetic construct
  source 1..21: mol_type = other RNA
agtagcactaacacttctctt

SEQ ID NO: 18651 - RNA, 21 nt, synthetic construct
  source 1..21: mol_type = other RNA
agtagcctttccttaatgata

SEQ ID NO: 18652 - RNA, 21 nt, synthetic construct
  source 1..21: mol_type = other RNA
agtagctgccttttagtgatc

SEQ ID NO: 18653 - RNA, 21 nt, synthetic construct
  source 1..21: mol_type = other RNA
agtatcagacaggctgggttt

SEQ ID NO: 18654 - RNA, 21 nt, synthetic construct
  source 1..21: mol_type = other RNA
agtatgttctgtcccatttgc

SEQ ID NO: 18655 - RNA, 21 nt, synthetic construct
  source 1..21: mol_type = other RNA
agtcataaagccagtaactgg

SEQ ID NO: 18656 - RNA, 21 nt, synthetic construct
  source 1..21: mol_type = other RNA
agtcatgcctctcattttgga

SEQ ID NO: 18657 - RNA, 21 nt, synthetic construct
  source 1..21: mol_type = other RNA
agtcctcacctatccctgttg

SEQ ID NO: 18658 - RNA, 21 nt, synthetic construct
  source 1..21: mol_type = other RNA
agtgatcatgtaccctgaata

SEQ ID NO: 18659 - RNA, 21 nt, synthetic construct
  source 1..21: mol_type = other RNA
agtgatgctctcacaaaatct

SEQ ID NO: 18660 - RNA, 21 nt, synthetic construct
  source 1..21: mol_type = other RNA
agtgctactaaatatacagat

SEQ ID NO: 18661 - RNA, 21 nt, synthetic construct
  source 1..21: mol_type = other RNA
agtgggatttgcgttttaatt

SEQ ID NO: 18662 - RNA, 21 nt, synthetic construct
  source 1..21: mol_type = other RNA
agtgtcaatctgtatatttag

SEQ ID NO: 18663 - RNA, 21 nt, synthetic construct
  source 1..21: mol_type = other RNA
agtgttagtgctactaaatat

SEQ ID NO: 18664 - RNA, 21 nt, synthetic construct
  source 1..21: mol_type = other RNA
agttaagttttggaagcttaa

SEQ ID NO: 18665 - RNA, 21 nt, synthetic construct
  source 1..21: mol_type = other RNA
agttactggctttatgacttt

SEQ ID NO: 18666 - RNA, 21 nt, synthetic construct
  source 1..21: mol_type = other RNA
agttatttaagcttccaaaac

SEQ ID NO: 18667 - RNA, 21 nt, synthetic construct
  source 1..21: mol_type = other RNA
agttccaggcaggatgaatct

SEQ ID NO: 18668 - RNA, 21 nt, synthetic construct
  source 1..21: mol_type = other RNA
agttggacccgataaaataca

SEQ ID NO: 18669 - RNA, 21 nt, synthetic construct
  source 1..21: mol_type = other RNA
agtttacagcaatcacctgtg

SEQ ID NO: 18670 - RNA, 21 nt, synthetic construct
  source 1..21: mol_type = other RNA
agttttggaagcttaaataac

SEQ ID NO: 18671 - RNA, 21 nt, synthetic construct
  source 1..21: mol_type = other RNA
ataaaatacaacagggatagg

SEQ ID NO: 18672 - RNA, 21 nt, synthetic construct
  source 1..21: mol_type = other RNA
ataaagccagtaactggttga

SEQ ID NO: 18673 - RNA, 21 nt, synthetic construct
  source 1..21: mol_type = other RNA
ataactctccaaaagtcataa

SEQ ID NO: 18674 - RNA, 21 nt, synthetic construct
  source 1..21: mol_type = other RNA
ataatattttcttcccacttc

SEQ ID NO: 18675 - RNA, 21 nt, synthetic construct
  source 1..21: mol_type = other RNA
ataatggaaagtatgttctgt

SEQ ID NO: 18676 - RNA, 21 nt, synthetic construct
  source 1..21: mol_type = other RNA
atacaacagggataggtgagg

SEQ ID NO: 18677 - RNA, 21 nt, synthetic construct
  source 1..21: mol_type = other RNA
atacaagagctggcaaatacc

SEQ ID NO: 18678 - RNA, 21 nt, synthetic construct
  source 1..21: mol_type = other RNA
atacacttatattcagggtac

SEQ ID NO: 18679 - RNA, 21 nt, synthetic construct
  source 1..21: mol_type = other RNA
ataccttaaatggttgagttg

SEQ ID NO: 18680 - RNA, 21 nt, synthetic construct
  source 1..21: mol_type = other RNA
atacttgtcctcttcttagaa

SEQ ID NO: 18681 - RNA, 21 nt, synthetic construct
  source 1..21: mol_type = other RNA
atagggtgtttctagagagat

SEQ ID NO: 18682 - RNA, 21 nt, synthetic construct
  source 1..21: mol_type = other RNA
ataggtgaggactatggcaaa

SEQ ID NO: 18683 - RNA, 21 nt, synthetic construct
  source 1..21: mol_type = other RNA
atagtcctcacctatccctgt

SEQ ID NO: 18684 - RNA, 21 nt, synthetic construct
  source 1..21: mol_type = other RNA
atatatctctctagaaacacc

SEQ ID NO: 18685 - RNA, 21 nt, synthetic construct
  source 1..21: mol_type = other RNA
atatatctggtcaaggtggcc

SEQ ID NO: 18686 - RNA, 21 nt, synthetic construct
  source 1..21: mol_type = other RNA
atatattcccaacctggctag

SEQ ID NO: 18687 - RNA, 21 nt, synthetic construct
  source 1..21: mol_type = other RNA
atatattgcctaatgtttcag

SEQ ID NO: 18688 - RNA, 21 nt, synthetic construct
  source 1..21: mol_type = other RNA
atatctctctagaaacaccct

SEQ ID NO: 18689 - RNA, 21 nt, synthetic construct
  source 1..21: mol_type = other RNA
atatctggtcaaggtggcctg

SEQ ID NO: 18690 - RNA, 21 nt, synthetic construct
  source 1..21: mol_type = other RNA
atatgccagacccctctctga

SEQ ID NO: 18691 - RNA, 21 nt, synthetic construct
  source 1..21: mol_type = other RNA
atattaaatgcctcagggatc

SEQ ID NO: 18692 - RNA, 21 nt, synthetic construct
  source 1..21: mol_type = other RNA
atattcagggtacatgatcac

SEQ ID NO: 18693 - RNA, 21 nt, synthetic construct
  source 1..21: mol_type = other RNA
atattcccaacctggctagtt

SEQ ID NO: 18694 - RNA, 21 nt, synthetic construct
  source 1..21: mol_type = other RNA
atattgcctaatgtttcagaa

SEQ ID NO: 18695 - RNA, 21 nt, synthetic construct
  source 1..21: mol_type = other RNA
atatttagtagcactaacact

SEQ ID NO: 18696 - RNA, 21 nt, synthetic construct
  source 1..21: mol_type = other RNA
atattttcttcccacttcccc

SEQ ID NO: 18697 - RNA, 21 nt, synthetic construct
  source 1..21: mol_type = other RNA
atcaaatggagtaatgcatgt

SEQ ID NO: 18698 - RNA, 21 nt, synthetic construct
  source 1..21: mol_type = other RNA
atcaagaggtggattggggaa

SEQ ID NO: 18699 - RNA, 21 nt, synthetic construct
  source 1..21: mol_type = other RNA
atcacctgtggatgctaatta

SEQ ID NO: 18700 - RNA, 21 nt, synthetic construct
  source 1..21: mol_type = other RNA
atcactaaaaggcagctactc

SEQ ID NO: 18701 - RNA, 21 nt, synthetic construct
  source 1..21: mol_type = other RNA
atcactgtaatcttttctaag

SEQ ID NO: 18702 - RNA, 21 nt, synthetic construct
  source 1..21: mol_type = other RNA
atcagacaggctgggtttgaa

SEQ ID NO: 18703 - RNA, 21 nt, synthetic construct
  source 1..21: mol_type = other RNA
atcagagcacagattcatcct

SEQ ID NO: 18704 - RNA, 21 nt, synthetic construct
  source 1..21: mol_type = other RNA
atcaggtcttcattagattcc

SEQ ID NO: 18705 - RNA, 21 nt, synthetic construct
  source 1..21: mol_type = other RNA
atcataatggaaagtatgttc

SEQ ID NO: 18706 - RNA, 21 nt, synthetic construct
  source 1..21: mol_type = other RNA
atcatgtaccctgaatataag

SEQ ID NO: 18707 - RNA, 21 nt, synthetic construct
  source 1..21: mol_type = other RNA
atcattaaggaaaggctacta

SEQ ID NO: 18708 - RNA, 21 nt, synthetic construct
  source 1..21: mol_type = other RNA
atccacaggtgattgctgtaa

SEQ ID NO: 18709 - RNA, 21 nt, synthetic construct
  source 1..21: mol_type = other RNA
atccacctcttgatggggcta

SEQ ID NO: 18710 - RNA, 21 nt, synthetic construct
  source 1..21: mol_type = other RNA
atccatggggaagtgggaaga

SEQ ID NO: 18711 - RNA, 21 nt, synthetic construct
  source 1..21: mol_type = other RNA
atcccactgtcacatgcatta

SEQ ID NO: 18712 - RNA, 21 nt, synthetic construct
  source 1..21: mol_type = other RNA
atccctgaggcatttaatatg

SEQ ID NO: 18713 - RNA, 21 nt, synthetic construct
  source 1..21: mol_type = other RNA
atccctgttgtattttatcgg

SEQ ID NO: 18714 - RNA, 21 nt, synthetic construct
  source 1..21: mol_type = other RNA
atcctgcctggaactctctgt

SEQ ID NO: 18715 - RNA, 21 nt, synthetic construct
  source 1..21: mol_type = other RNA
atcgggtccaactcaaccatt

SEQ ID NO: 18716 - RNA, 21 nt, synthetic construct
  source 1..21: mol_type = other RNA
atctaatgaagacctgatttt

SEQ ID NO: 18717 - RNA, 21 nt, synthetic construct
  source 1..21: mol_type = other RNA
atctctctagaaacaccctat

SEQ ID NO: 18718 - RNA, 21 nt, synthetic construct
  source 1..21: mol_type = other RNA
atctgagcttctaataataag

SEQ ID NO: 18719 - RNA, 21 nt, synthetic construct
  source 1..21: mol_type = other RNA
atctggtcaaggtggcctggt

SEQ ID NO: 18720 - RNA, 21 nt, synthetic construct
  source 1..21: mol_type = other RNA
atctgtatatttagtagcact

SEQ ID NO: 18721 - RNA, 21 nt, synthetic construct
  source 1..21: mol_type = other RNA
atctgtgctctgatccctgag

SEQ ID NO: 18722 - RNA, 21 nt, synthetic construct
  source 1..21: mol_type = other RNA
atcttgccgccttccctcaaa

SEQ ID NO: 18723 - RNA, 21 nt, synthetic construct
  source 1..21: mol_type = other RNA
atcttttctaagaagaggaca

SEQ ID NO: 18724 - RNA, 21 nt, synthetic construct
  source 1..21: mol_type = other RNA
atgaaattaggtacaaagtca

SEQ ID NO: 18725 - RNA, 21 nt, synthetic construct
  source 1..21: mol_type = other RNA
atgaagagaagtgttagtgct

SEQ ID NO: 18726 - RNA, 21 nt, synthetic construct
  source 1..21: mol_type = other RNA
atgaatctgtgctctgatccc

SEQ ID NO: 18727 - RNA, 21 nt, synthetic construct
  source 1..21: mol_type = other RNA
atgactagaccatccatgggg

SEQ ID NO: 18728 - RNA, 21 nt, synthetic construct
  source 1..21: mol_type = other RNA
atgacttttggagagttattt

SEQ ID NO: 18729 - RNA, 21 nt, synthetic construct
  source 1..21: mol_type = other RNA
atgagaggcatgactagacca

SEQ ID NO: 18730 - RNA, 21 nt, synthetic construct
  source 1..21: mol_type = other RNA
atgatagggtgtttctagaga

SEQ ID NO: 18731 - RNA, 21 nt, synthetic construct
  source 1..21: mol_type = other RNA
atgatcaaatggagtaatgca

SEQ ID NO: 18732 - RNA, 21 nt, synthetic construct
  source 1..21: mol_type = other RNA
atgatcactaaaaggcagcta

SEQ ID NO: 18733 - RNA, 21 nt, synthetic construct
  source 1..21: mol_type = other RNA
atgcaaagagctctcttagct

SEQ ID NO: 18734 - RNA, 21 nt, synthetic construct
  source 1..21: mol_type = other RNA
atgcatacaagagctggcaaa

SEQ ID NO: 18735 - RNA, 21 nt, synthetic construct
  source 1..21: mol_type = other RNA
atgcatgtgacagtgggattt

SEQ ID NO: 18736 - RNA, 21 nt, synthetic construct
  source 1..21: mol_type = other RNA
atgcattactccatttgatca

SEQ ID NO: 18737 - RNA, 21 nt, synthetic construct
  source 1..21: mol_type = other RNA
atgcatttaggttttgtttct

SEQ ID NO: 18738 - RNA, 21 nt, synthetic construct
  source 1..21: mol_type = other RNA
atgccagacccctctctgact

SEQ ID NO: 18739 - RNA, 21 nt, synthetic construct
  source 1..21: mol_type = other RNA
atgcccacagtaaaacaaaaa

SEQ ID NO: 18740 - RNA, 21 nt, synthetic construct
  source 1..21: mol_type = other RNA
atgcctcagggatcagagcac

SEQ ID NO: 18741 - RNA, 21 nt, synthetic construct
  source 1..21: mol_type = other RNA
atgcctctcattttggaaagt

SEQ ID NO: 18742 - RNA, 21 nt, synthetic construct
  source 1..21: mol_type = other RNA
atgctaattaaaacgcaaatc

SEQ ID NO: 18743 - RNA, 21 nt, synthetic construct
  source 1..21: mol_type = other RNA
atgctctcacaaaatcttgcc

SEQ ID NO: 18744 - RNA, 21 nt, synthetic construct
  source 1..21: mol_type = other RNA
atggaaagtatgttctgtccc

SEQ ID NO: 18745 - RNA, 21 nt, synthetic construct
  source 1..21: mol_type = other RNA
atggagtaatgcatgtgacag

SEQ ID NO: 18746 - RNA, 21 nt, synthetic construct
  source 1..21: mol_type = other RNA
atggatggtctagtcatgcct

SEQ ID NO: 18747 - RNA, 21 nt, synthetic construct
  source 1..21: mol_type = other RNA
atggcaaatgggacagaacat

SEQ ID NO: 18748 - RNA, 21 nt, synthetic construct
  source 1..21: mol_type = other RNA
atgggacagaacatactttcc

SEQ ID NO: 18749 - RNA, 21 nt, synthetic construct
  source 1..21: mol_type = other RNA
atggggaagtgggaagaaaat

SEQ ID NO: 18750 - RNA, 21 nt, synthetic construct
  source 1..21: mol_type = other RNA
atggggctagtagcctttcct

SEQ ID NO: 18751 - RNA, 21 nt, synthetic construct
  source 1..21: mol_type = other RNA
atggtctagtcatgcctctca

SEQ ID NO: 18752 - RNA, 21 nt, synthetic construct
  source 1..21: mol_type = other RNA
atggttgagttggacccgata

SEQ ID NO: 18753 - RNA, 21 nt, synthetic construct
  source 1..21: mol_type = other RNA
atgtaccctgaatataagtgt

SEQ ID NO: 18754 - RNA, 21 nt, synthetic construct
  source 1..21: mol_type = other RNA
atgtgacagtgggatttgcgt

SEQ ID NO: 18755 - RNA, 21 nt, synthetic construct
  source 1..21: mol_type = other RNA
atgttctgtcccatttgccat

SEQ ID NO: 18756 - RNA, 21 nt, synthetic construct
  source 1..21: mol_type = other RNA
atgtttcagaaacagtacttt

SEQ ID NO: 18757 - RNA, 21 nt, synthetic construct
  source 1..21: mol_type = other RNA
attaaaacgcaaatcccactg

SEQ ID NO: 18758 - RNA, 21 nt, synthetic construct
  source 1..21: mol_type = other RNA
attaaaagctaagagagctct

SEQ ID NO: 18759 - RNA, 21 nt, synthetic construct
  source 1..21: mol_type = other RNA
attaaatgcctcagggatcag

SEQ ID NO: 18760 - RNA, 21 nt, synthetic construct
  source 1..21: mol_type = other RNA
attaaggaaaggctactagcc

SEQ ID NO: 18761 - RNA, 21 nt, synthetic construct
  source 1..21: mol_type = other RNA
attaatttatgcccacagtaa

SEQ ID NO: 18762 - RNA, 21 nt, synthetic construct
  source 1..21: mol_type = other RNA
attacagtgatgctctcacaa

SEQ ID NO: 18763 - RNA, 21 nt, synthetic construct
  source 1..21: mol_type = other RNA
attagaagctcagatgcaaag

SEQ ID NO: 18764 - RNA, 21 nt, synthetic construct
  source 1..21: mol_type = other RNA
attagattccccaatccacct

SEQ ID NO: 18765 - RNA, 21 nt, synthetic construct
  source 1..21: mol_type = other RNA
attagcatccacaggtgattg

SEQ ID NO: 18766 - RNA, 21 nt, synthetic construct
  source 1..21: mol_type = other RNA
attaggcaatatattcccaac

SEQ ID NO: 18767 - RNA, 21 nt, synthetic construct
  source 1..21: mol_type = other RNA
attaggtacaaagtcagagag

SEQ ID NO: 18768 - RNA, 21 nt, synthetic construct
  source 1..21: mol_type = other RNA
attattagaagctcagatgca

SEQ ID NO: 18769 - RNA, 21 nt, synthetic construct
  source 1..21: mol_type = other RNA
attcaaacccagcctgtctga

SEQ ID NO: 18770 - RNA, 21 nt, synthetic construct
  source 1..21: mol_type = other RNA
attcagggtacatgatcacta

SEQ ID NO: 18771 - RNA, 21 nt, synthetic construct
  source 1..21: mol_type = other RNA
attcatcctgcctggaactct

SEQ ID NO: 18772 - RNA, 21 nt, synthetic construct
  source 1..21: mol_type = other RNA
attcccaacctggctagttta

SEQ ID NO: 18773 - RNA, 21 nt, synthetic construct
  source 1..21: mol_type = other RNA
attccccaatccacctcttga

SEQ ID NO: 18774 - RNA, 21 nt, synthetic construct
  source 1..21: mol_type = other RNA
attgaaaatgaagagaagtgt

SEQ ID NO: 18775 - RNA, 21 nt, synthetic construct
  source 1..21: mol_type = other RNA
attgcctaatgtttcagaaac

SEQ ID NO: 18776 - RNA, 21 nt, synthetic construct
  source 1..21: mol_type = other RNA
attgctgtaaactagccaggt

SEQ ID NO: 18777 - RNA, 21 nt, synthetic construct
  source 1..21: mol_type = other RNA
attggggaatctaatgaagac

SEQ ID NO: 18778 - RNA, 21 nt, synthetic construct
  source 1..21: mol_type = other RNA
atttaaggtatttgccagctc

SEQ ID NO: 18779 - RNA, 21 nt, synthetic construct
  source 1..21: mol_type = other RNA
atttagtagcactaacacttc

SEQ ID NO: 18780 - RNA, 21 nt, synthetic construct
  source 1..21: mol_type = other RNA
atttatgcccacagtaaaaca

SEQ ID NO: 18781 - RNA, 21 nt, synthetic construct
  source 1..21: mol_type = other RNA
atttgccagctcttgtatgca

SEQ ID NO: 18782 - RNA, 21 nt, synthetic construct
  source 1..21: mol_type = other RNA
atttgccatagtcctcaccta

SEQ ID NO: 18783 - RNA, 21 nt, synthetic construct
  source 1..21: mol_type = other RNA
atttgcgttttaattagcatc

SEQ ID NO: 18784 - RNA, 21 nt, synthetic construct
  source 1..21: mol_type = other RNA
atttgggctcaaccagttact

SEQ ID NO: 18785 - RNA, 21 nt, synthetic construct
  source 1..21: mol_type = other RNA
attttatcgggtccaactcaa

SEQ ID NO: 18786 - RNA, 21 nt, synthetic construct
  source 1..21: mol_type = other RNA
attttcttcccacttccccat

SEQ ID NO: 18787 - RNA, 21 nt, synthetic construct
  source 1..21: mol_type = other RNA
attttggaaagtactgtttct

SEQ ID NO: 18788 - RNA, 21 nt, synthetic construct
  source 1..21: mol_type = other RNA
attttgtgagagcatcactgt

SEQ ID NO: 18789 - RNA, 21 nt, synthetic construct
  source 1..21: mol_type = other RNA
caaaacctaaatgcatacaag

SEQ ID NO: 18790 - RNA, 21 nt, synthetic construct
  source 1..21: mol_type = other RNA
caaaagtcataaagccagtaa

SEQ ID NO: 18791 - RNA, 21 nt, synthetic construct
  source 1..21: mol_type = other RNA
caaaatcttgccgccttccct

SEQ ID NO: 18792 - RNA, 21 nt, synthetic construct
  source 1..21: mol_type = other RNA
caaaatgagaggcatgactag

SEQ ID NO: 18793 - RNA, 21 nt, synthetic construct
  source 1..21: mol_type = other RNA
caaacagagagttccaggcag

SEQ ID NO: 18794 - RNA, 21 nt, synthetic construct
  source 1..21: mol_type = other RNA
caaacccagcctgtctgatac

SEQ ID NO: 18795 - RNA, 21 nt, synthetic construct
  source 1..21: mol_type = other RNA
caaagaaacaaaacctaaatg

SEQ ID NO: 18796 - RNA, 21 nt, synthetic construct
  source 1..21: mol_type = other RNA
caaagagctctcttagctttt

SEQ ID NO: 18797 - RNA, 21 nt, synthetic construct
  source 1..21: mol_type = other RNA
caaagtcagagaggggtctgg

SEQ ID NO: 18798 - RNA, 21 nt, synthetic construct
  source 1..21: mol_type = other RNA
caaataccttaaatggttgag

SEQ ID NO: 18799 - RNA, 21 nt, synthetic construct
  source 1..21: mol_type = other RNA
caaatcccactgtcacatgca

SEQ ID NO: 18800 - RNA, 21 nt, synthetic construct
  source 1..21: mol_type = other RNA
caaatggagtaatgcatgtga

SEQ ID NO: 18801 - RNA, 21 nt, synthetic construct
  source 1..21: mol_type = other RNA
caaatgggacagaacatactt

SEQ ID NO: 18802 - RNA, 21 nt, synthetic construct
  source 1..21: mol_type = other RNA
caaattcaaacccagcctgtc

SEQ ID NO: 18803 - RNA, 21 nt, synthetic construct
  source 1..21: mol_type = other RNA
caacagggataggtgaggact

SEQ ID NO: 18804 - RNA, 21 nt, synthetic construct
  source 1..21: mol_type = other RNA
caaccagttactggctttatg

SEQ ID NO: 18805 - RNA, 21 nt, synthetic construct
  source 1..21: mol_type = other RNA
caaccatttaaggtatttgcc

SEQ ID NO: 18806 - RNA, 21 nt, synthetic construct
  source 1..21: mol_type = other RNA
caacctggctagtttacagca

SEQ ID NO: 18807 - RNA, 21 nt, synthetic construct
  source 1..21: mol_type = other RNA
caactcaaccatttaaggtat

SEQ ID NO: 18808 - RNA, 21 nt, synthetic construct
  source 1..21: mol_type = other RNA
caagagctggcaaatacctta

SEQ ID NO: 18809 - RNA, 21 nt, synthetic construct
  source 1..21: mol_type = other RNA
caagaggtggattggggaatc

SEQ ID NO: 18810 - RNA, 21 nt, synthetic construct
  source 1..21: mol_type = other RNA
caagattttgtgagagcatca

SEQ ID NO: 18811 - RNA, 21 nt, synthetic construct
  source 1..21: mol_type = other RNA
caaggaggagtagctgccttt

SEQ ID NO: 18812 - RNA, 21 nt, synthetic construct
  source 1..21: mol_type = other RNA
caaggtggcctggtactcctc

SEQ ID NO: 18813 - RNA, 21 nt, synthetic construct
  source 1..21: mol_type = other RNA
caagtatcagacaggctgggt

SEQ ID NO: 18814 - RNA, 21 nt, synthetic construct
  source 1..21: mol_type = other RNA
caatatattcccaacctggct

SEQ ID NO: 18815 - RNA, 21 nt, synthetic construct
  source 1..21: mol_type = other RNA
caatcacctgtggatgctaat

SEQ ID NO: 18816 - RNA, 21 nt, synthetic construct
  source 1..21: mol_type = other RNA
caatccacctcttgatggggc

SEQ ID NO: 18817 - RNA, 21 nt, synthetic construct
  source 1..21: mol_type = other RNA
caatctgtatatttagtagca

SEQ ID NO: 18818 - RNA, 21 nt, synthetic construct
  source 1..21: mol_type = other RNA
cacaaaatcttgccgccttcc

SEQ ID NO: 18819 - RNA, 21 nt, synthetic construct
  source 1..21: mol_type = other RNA
cacagattcatcctgcctgga

SEQ ID NO: 18820 - RNA, 21 nt, synthetic construct
  source 1..21: mol_type = other RNA
cacagcctcccagacaaggag

SEQ ID NO: 18821 - RNA, 21 nt, synthetic construct
  source 1..21: mol_type = other RNA
cacaggtgattgctgtaaact

SEQ ID NO: 18822 - RNA, 21 nt, synthetic construct
  source 1..21: mol_type = other RNA
cacatatatttagtgtcaatc

SEQ ID NO: 18823 - RNA, 21 nt, synthetic construct
  source 1..21: mol_type = other RNA
cacatgcattactccatttga

SEQ ID NO: 18824 - RNA, 21 nt, synthetic construct
  source 1..21: mol_type = other RNA
caccctatcattaaggaaagg

SEQ ID NO: 18825 - RNA, 21 nt, synthetic construct
  source 1..21: mol_type = other RNA
cacctatccctgttgtatttt

SEQ ID NO: 18826 - RNA, 21 nt, synthetic construct
  source 1..21: mol_type = other RNA
cacctcttgatggggctagta

SEQ ID NO: 18827 - RNA, 21 nt, synthetic construct
  source 1..21: mol_type = other RNA
cacctgtggatgctaattaaa

SEQ ID NO: 18828 - RNA, 21 nt, synthetic construct
  source 1..21: mol_type = other RNA
caccttgaccagatatatctc

SEQ ID NO: 18829 - RNA, 21 nt, synthetic construct
  source 1..21: mol_type = other RNA
cactaaaaggcagctactcct

SEQ ID NO: 18830 - RNA, 21 nt, synthetic construct
  source 1..21: mol_type = other RNA
cactaacacttctcttcattt

SEQ ID NO: 18831 - RNA, 21 nt, synthetic construct
  source 1..21: mol_type = other RNA
cactgtaatcttttctaagaa

SEQ ID NO: 18832 - RNA, 21 nt, synthetic construct
  source 1..21: mol_type = other RNA
cactgtcacatgcattactcc

SEQ ID NO: 18833 - RNA, 21 nt, synthetic construct
  source 1..21: mol_type = other RNA
cacttatattcagggtacatg

SEQ ID NO: 18834 - RNA, 21 nt, synthetic construct
  source 1..21: mol_type = other RNA
cacttccccatggatggtcta

SEQ ID NO: 18835 - RNA, 21 nt, synthetic construct
  source 1..21: mol_type = other RNA
cacttctcttcattttcaatg

SEQ ID NO: 18836 - RNA, 21 nt, synthetic construct
  source 1..21: mol_type = other RNA
cagaaacagtactttccaaaa

SEQ ID NO: 18837 - RNA, 21 nt, synthetic construct
  source 1..21: mol_type = other RNA
cagaacatactttccattatg

SEQ ID NO: 18838 - RNA, 21 nt, synthetic construct
  source 1..21: mol_type = other RNA
cagacaaggaggagtagctgc

SEQ ID NO: 18839 - RNA, 21 nt, synthetic construct
  source 1..21: mol_type = other RNA
cagacaggctgggtttgaatt

SEQ ID NO: 18840 - RNA, 21 nt, synthetic construct
  source 1..21: mol_type = other RNA
cagacccctctctgactttgt

SEQ ID NO: 18841 - RNA, 21 nt, synthetic construct
  source 1..21: mol_type = other RNA
cagagagttccaggcaggatg

SEQ ID NO: 18842 - RNA, 21 nt, synthetic construct
  source 1..21: mol_type = other RNA
cagagcacagattcatcctgc

SEQ ID NO: 18843 - RNA, 21 nt, synthetic construct
  source 1..21: mol_type = other RNA
cagatatatctctctagaaac

SEQ ID NO: 18844 - RNA, 21 nt, synthetic construct
  source 1..21: mol_type = other RNA
cagatgcaaagagctctctta

SEQ ID NO: 18845 - RNA, 21 nt, synthetic construct
  source 1..21: mol_type = other RNA
cagattcatcctgcctggaac

SEQ ID NO: 18846 - RNA, 21 nt, synthetic construct
  source 1..21: mol_type = other RNA
cagattgacactaaatatatg

SEQ ID NO: 18847 - RNA, 21 nt, synthetic construct
  source 1..21: mol_type = other RNA
cagcaatcacctgtggatgct

SEQ ID NO: 18848 - RNA, 21 nt, synthetic construct
  source 1..21: mol_type = other RNA
cagcctcccagacaaggagga

SEQ ID NO: 18849 - RNA, 21 nt, synthetic construct
  source 1..21: mol_type = other RNA
cagcctgtctgatacttgtcc

SEQ ID NO: 18850 - RNA, 21 nt, synthetic construct
  source 1..21: mol_type = other RNA
cagctactcctccttgtctgg

SEQ ID NO: 18851 - RNA, 21 nt, synthetic construct
  source 1..21: mol_type = other RNA
cagctcttgtatgcatttagg

SEQ ID NO: 18852 - RNA, 21 nt, synthetic construct
  source 1..21: mol_type = other RNA
caggatgaatctgtgctctga

SEQ ID NO: 18853 - RNA, 21 nt, synthetic construct
  source 1..21: mol_type = other RNA
caggcaggatgaatctgtgct

SEQ ID NO: 18854 - RNA, 21 nt, synthetic construct
  source 1..21: mol_type = other RNA
caggccaccttgaccagatat

SEQ ID NO: 18855 - RNA, 21 nt, synthetic construct
  source 1..21: mol_type = other RNA
caggctgggtttgaatttggg

SEQ ID NO: 18856 - RNA, 21 nt, synthetic construct
  source 1..21: mol_type = other RNA
cagggataggtgaggactatg

SEQ ID NO: 18857 - RNA, 21 nt, synthetic construct
  source 1..21: mol_type = other RNA
cagggatcagagcacagattc

SEQ ID NO: 18858 - RNA, 21 nt, synthetic construct
  source 1..21: mol_type = other RNA
cagggtacatgatcactaaaa

SEQ ID NO: 18859 - RNA, 21 nt, synthetic construct
  source 1..21: mol_type = other RNA
caggtcttcattagattcccc

SEQ ID NO: 18860 - RNA, 21 nt, synthetic construct
  source 1..21: mol_type = other RNA
caggtgattgctgtaaactag

SEQ ID NO: 18861 - RNA, 21 nt, synthetic construct
  source 1..21: mol_type = other RNA
caggttgggaatatattgcct

SEQ ID NO: 18862 - RNA, 21 nt, synthetic construct
  source 1..21: mol_type = other RNA
cagtaaaacaaaaacaaaacc

SEQ ID NO: 18863 - RNA, 21 nt, synthetic construct
  source 1..21: mol_type = other RNA
cagtaactggttgagcccaaa

SEQ ID NO: 18864 - RNA, 21 nt, synthetic construct
  source 1..21: mol_type = other RNA
cagtactttccaaaatgagag

SEQ ID NO: 18865 - RNA, 21 nt, synthetic construct
  source 1..21: mol_type = other RNA
cagtgatgctctcacaaaatc

SEQ ID NO: 18866 - RNA, 21 nt, synthetic construct
  source 1..21: mol_type = other RNA
cagtgggatttgcgttttaat

SEQ ID NO: 18867 - RNA, 21 nt, synthetic construct
  source 1..21: mol_type = other RNA
cagttaagttttggaagctta

SEQ ID NO: 18868 - RNA, 21 nt, synthetic construct
  source 1..21: mol_type = other RNA
cagttactggctttatgactt

SEQ ID NO: 18869 - RNA, 21 nt, synthetic construct
  source 1..21: mol_type = other RNA
cataaagccagtaactggttg

SEQ ID NO: 18870 - RNA, 21 nt, synthetic construct
  source 1..21: mol_type = other RNA
cataacattaaaagctaagag

SEQ ID NO: 18871 - RNA, 21 nt, synthetic construct
  source 1..21: mol_type = other RNA
cataatggaaagtatgttctg

SEQ ID NO: 18872 - RNA, 21 nt, synthetic construct
  source 1..21: mol_type = other RNA
catacaagagctggcaaatac

SEQ ID NO: 18873 - RNA, 21 nt, synthetic construct
  source 1..21: mol_type = other RNA
catactttccattatgatcaa

SEQ ID NO: 18874 - RNA, 21 nt, synthetic construct
  source 1..21: mol_type = other RNA
catagtcctcacctatccctg

SEQ ID NO: 18875 - RNA, 21 nt, synthetic construct
  source 1..21: mol_type = other RNA
catatatttagtgtcaatctg

SEQ ID NO: 18876 - RNA, 21 nt, synthetic construct
  source 1..21: mol_type = other RNA
catattaaatgcctcagggat

SEQ ID NO: 18877 - RNA, 21 nt, synthetic construct
  source 1..21: mol_type = other RNA
catcaagaggtggattgggga

SEQ ID NO: 18878 - RNA, 21 nt, synthetic construct
  source 1..21: mol_type = other RNA
catcactgtaatcttttctaa

SEQ ID NO: 18879 - RNA, 21 nt, synthetic construct
  source 1..21: mol_type = other RNA
catccacaggtgattgctgta

SEQ ID NO: 18880 - RNA, 21 nt, synthetic construct
  source 1..21: mol_type = other RNA
catccatggggaagtgggaag

SEQ ID NO: 18881 - RNA, 21 nt, synthetic construct
  source 1..21: mol_type = other RNA
catcctgcctggaactctctg

SEQ ID NO: 18882 - RNA, 21 nt, synthetic construct
  source 1..21: mol_type = other RNA
catctgagcttctaataataa

SEQ ID NO: 18883 - RNA, 21 nt, synthetic construct
  source 1..21: mol_type = other RNA
catgaaattaggtacaaagtc

SEQ ID NO: 18884 - RNA, 21 nt, synthetic construct
  source 1..21: mol_type = other RNA
catgactagaccatccatggg

SEQ ID NO: 18885 - RNA, 21 nt, synthetic construct
  source 1..21: mol_type = other RNA
catgagctaaaaaacaaagaa

SEQ ID NO: 18886 - RNA, 21 nt, synthetic construct
  source 1..21: mol_type = other RNA
catgatcactaaaaggcagct

SEQ ID NO: 18887 - RNA, 21 nt, synthetic construct
  source 1..21: mol_type = other RNA
catgcattactccatttgatc

SEQ ID NO: 18888 - RNA, 21 nt, synthetic construct
  source 1..21: mol_type = other RNA
catgcctctcattttggaaag

SEQ ID NO: 18889 - RNA, 21 nt, synthetic construct
  source 1..21: mol_type = other RNA
catggatggtctagtcatgcc

SEQ ID NO: 18890 - RNA, 21 nt, synthetic construct
  source 1..21: mol_type = other RNA
catggggaagtgggaagaaaa

SEQ ID NO: 18891 - RNA, 21 nt, synthetic construct
  source 1..21: mol_type = other RNA
catgtaccctgaatataagtg

SEQ ID NO: 18892 - RNA, 21 nt, synthetic construct
  source 1..21: mol_type = other RNA
catgtgacagtgggatttgcg

SEQ ID NO: 18893 - RNA, 21 nt, synthetic construct
  source 1..21: mol_type = other RNA
cattaaaagctaagagagctc

SEQ ID NO: 18894 - RNA, 21 nt, synthetic construct
  source 1..21: mol_type = other RNA
cattaaggaaaggctactagc

SEQ ID NO: 18895 - RNA, 21 nt, synthetic construct
  source 1..21: mol_type = other RNA
cattactccatttgatcataa

SEQ ID NO: 18896 - RNA, 21 nt, synthetic construct
  source 1..21: mol_type = other RNA
cattagattccccaatccacc

SEQ ID NO: 18897 - RNA, 21 nt, synthetic construct
  source 1..21: mol_type = other RNA
cattaggcaatatattcccaa

SEQ ID NO: 18898 - RNA, 21 nt, synthetic construct
  source 1..21: mol_type = other RNA
cattatgatcaaatggagtaa

SEQ ID NO: 18899 - RNA, 21 nt, synthetic construct
  source 1..21: mol_type = other RNA
cattgaaaatgaagagaagtg

SEQ ID NO: 18900 - RNA, 21 nt, synthetic construct
  source 1..21: mol_type = other RNA
catttaaggtatttgccagct

SEQ ID NO: 18901 - RNA, 21 nt, synthetic construct
  source 1..21: mol_type = other RNA
catttaggttttgtttctttg

SEQ ID NO: 18902 - RNA, 21 nt, synthetic construct
  source 1..21: mol_type = other RNA
catttgatcataatggaaagt

SEQ ID NO: 18903 - RNA, 21 nt, synthetic construct
  source 1..21: mol_type = other RNA
catttgccatagtcctcacct

SEQ ID NO: 18904 - RNA, 21 nt, synthetic construct
  source 1..21: mol_type = other RNA
cattttggaaagtactgtttc

SEQ ID NO: 18905 - RNA, 21 nt, synthetic construct
  source 1..21: mol_type = other RNA
ccaaaagtcataaagccagta

SEQ ID NO: 18906 - RNA, 21 nt, synthetic construct
  source 1..21: mol_type = other RNA
ccaaaatgagaggcatgacta

SEQ ID NO: 18907 - RNA, 21 nt, synthetic construct
  source 1..21: mol_type = other RNA
ccaaattcaaacccagcctgt

SEQ ID NO: 18908 - RNA, 21 nt, synthetic construct
  source 1..21: mol_type = other RNA
ccaacctggctagtttacagc

SEQ ID NO: 18909 - RNA, 21 nt, synthetic construct
  source 1..21: mol_type = other RNA
ccaactcaaccatttaaggta

SEQ ID NO: 18910 - RNA, 21 nt, synthetic construct
  source 1..21: mol_type = other RNA
ccaatccacctcttgatgggg

SEQ ID NO: 18911 - RNA, 21 nt, synthetic construct
  source 1..21: mol_type = other RNA
ccacagcctcccagacaagga

SEQ ID NO: 18912 - RNA, 21 nt, synthetic construct
  source 1..21: mol_type = other RNA
ccacaggtgattgctgtaaac

SEQ ID NO: 18913 - RNA, 21 nt, synthetic construct
  source 1..21: mol_type = other RNA
ccacagtaaaacaaaaacaaa

SEQ ID NO: 18914 - RNA, 21 nt, synthetic construct
  source 1..21: mol_type = other RNA
ccacctcttgatggggctagt

SEQ ID NO: 18915 - RNA, 21 nt, synthetic construct
  source 1..21: mol_type = other RNA
ccaccttgaccagatatatct

SEQ ID NO: 18916 - RNA, 21 nt, synthetic construct
  source 1..21: mol_type = other RNA
ccactgtcacatgcattactc

SEQ ID NO: 18917 - RNA, 21 nt, synthetic construct
  source 1..21: mol_type = other RNA
ccacttccccatggatggtct

SEQ ID NO: 18918 - RNA, 21 nt, synthetic construct
  source 1..21: mol_type = other RNA
ccagacaaggaggagtagctg

SEQ ID NO: 18919 - RNA, 21 nt, synthetic construct
  source 1..21: mol_type = other RNA
ccagacccctctctgactttg

SEQ ID NO: 18920 - RNA, 21 nt, synthetic construct
  source 1..21: mol_type = other RNA
ccagatatatctctctagaaa

SEQ ID NO: 18921 - RNA, 21 nt, synthetic construct
  source 1..21: mol_type = other RNA
ccagcctgtctgatacttgtc

SEQ ID NO: 18922 - RNA, 21 nt, synthetic construct
  source 1..21: mol_type = other RNA
ccagctcttgtatgcatttag

SEQ ID NO: 18923 - RNA, 21 nt, synthetic construct
  source 1..21: mol_type = other RNA
ccaggcaggatgaatctgtgc

SEQ ID NO: 18924 - RNA, 21 nt, synthetic construct
  source 1..21: mol_type = other RNA
ccaggccaccttgaccagata

SEQ ID NO: 18925 - RNA, 21 nt, synthetic construct
  source 1..21: mol_type = other RNA
ccaggttgggaatatattgcc

SEQ ID NO: 18926 - RNA, 21 nt, synthetic construct
  source 1..21: mol_type = other RNA
ccagtaactggttgagcccaa

SEQ ID NO: 18927 - RNA, 21 nt, synthetic construct
  source 1..21: mol_type = other RNA
ccagttactggctttatgact

SEQ ID NO: 18928 - RNA, 21 nt, synthetic construct
  source 1..21: mol_type = other RNA
ccatagtcctcacctatccct

SEQ ID NO: 18929 - RNA, 21 nt, synthetic construct
  source 1..21: mol_type = other RNA
ccatcaagaggtggattgggg

SEQ ID NO: 18930 - RNA, 21 nt, synthetic construct
  source 1..21: mol_type = other RNA
ccatccatggggaagtgggaa

SEQ ID NO: 18931 - RNA, 21 nt, synthetic construct
  source 1..21: mol_type = other RNA
ccatggatggtctagtcatgc

SEQ ID NO: 18932 - RNA, 21 nt, synthetic construct
  source 1..21: mol_type = other RNA
ccatggggaagtgggaagaaa

SEQ ID NO: 18933 - RNA, 21 nt, synthetic construct
  source 1..21: mol_type = other RNA
ccattatgatcaaatggagta

SEQ ID NO: 18934 - RNA, 21 nt, synthetic construct
  source 1..21: mol_type = other RNA
ccatttaaggtatttgccagc

SEQ ID NO: 18935 - RNA, 21 nt, synthetic construct
  source 1..21: mol_type = other RNA
ccatttgatcataatggaaag

SEQ ID NO: 18936 - RNA, 21 nt, synthetic construct
  source 1..21: mol_type = other RNA
ccatttgccatagtcctcacc

SEQ ID NO: 18937 - RNA, 21 nt, synthetic construct
  source 1..21: mol_type = other RNA
cccaaattcaaacccagcctg

SEQ ID NO: 18938 - RNA, 21 nt, synthetic construct
  source 1..21: mol_type = other RNA
cccaacctggctagtttacag

SEQ ID NO: 18939 - RNA, 21 nt, synthetic construct
  source 1..21: mol_type = other RNA
cccaatccacctcttgatggg

SEQ ID NO: 18940 - RNA, 21 nt, synthetic construct
  source 1..21: mol_type = other RNA
cccacagcctcccagacaagg

SEQ ID NO: 18941 - RNA, 21 nt, synthetic construct
  source 1..21: mol_type = other RNA
cccacagtaaaacaaaaacaa

SEQ ID NO: 18942 - RNA, 21 nt, synthetic construct
  source 1..21: mol_type = other RNA
cccactgtcacatgcattact

SEQ ID NO: 18943 - RNA, 21 nt, synthetic construct
  source 1..21: mol_type = other RNA
cccacttccccatggatggtc

SEQ ID NO: 18944 - RNA, 21 nt, synthetic construct
  source 1..21: mol_type = other RNA
cccagacaaggaggagtagct

SEQ ID NO: 18945 - RNA, 21 nt, synthetic construct
  source 1..21: mol_type = other RNA
cccagcctgtctgatacttgt

SEQ ID NO: 18946 - RNA, 21 nt, synthetic construct
  source 1..21: mol_type = other RNA
cccatcaagaggtggattggg

SEQ ID NO: 18947 - RNA, 21 nt, synthetic construct
  source 1..21: mol_type = other RNA
cccatggatggtctagtcatg

SEQ ID NO: 18948 - RNA, 21 nt, synthetic construct
  source 1..21: mol_type = other RNA
cccatttgccatagtcctcac

SEQ ID NO: 18949 - RNA, 21 nt, synthetic construct
  source 1..21: mol_type = other RNA
ccccaatccacctcttgatgg

SEQ ID NO: 18950 - RNA, 21 nt, synthetic construct
  source 1..21: mol_type = other RNA
ccccacagcctcccagacaag

SEQ ID NO: 18951 - RNA, 21 nt, synthetic construct
  source 1..21: mol_type = other RNA
ccccatcaagaggtggattgg

SEQ ID NO: 18952 - RNA, 21 nt, synthetic construct
  source 1..21: mol_type = other RNA
ccccatggatggtctagtcat

SEQ ID NO: 18953 - RNA, 21 nt, synthetic construct
  source 1..21: mol_type = other RNA
cccctctctgactttgtacct

SEQ ID NO: 18954 - RNA, 21 nt, synthetic construct
  source 1..21: mol_type = other RNA
cccgataaaatacaacaggga

SEQ ID NO: 18955 - RNA, 21 nt, synthetic construct
  source 1..21: mol_type = other RNA
ccctatcattaaggaaaggct

SEQ ID NO: 18956 - RNA, 21 nt, synthetic construct
  source 1..21: mol_type = other RNA
ccctcaaacagagagttccag

SEQ ID NO: 18957 - RNA, 21 nt, synthetic construct
  source 1..21: mol_type = other RNA
ccctctctgactttgtaccta

SEQ ID NO: 18958 - RNA, 21 nt, synthetic construct
  source 1..21: mol_type = other RNA
ccctgaatataagtgtattta

SEQ ID NO: 18959 - RNA, 21 nt, synthetic construct
  source 1..21: mol_type = other RNA
ccctgaggcatttaatatgtt

SEQ ID NO: 18960 - RNA, 21 nt, synthetic construct
  source 1..21: mol_type = other RNA
ccctgttgtattttatcgggt

SEQ ID NO: 18961 - RNA, 21 nt, synthetic construct
  source 1..21: mol_type = other RNA
ccgataaaatacaacagggat

SEQ ID NO: 18962 - RNA, 21 nt, synthetic construct
  source 1..21: mol_type = other RNA
ccgccttccctcaaacagaga

SEQ ID NO: 18963 - RNA, 21 nt, synthetic construct
  source 1..21: mol_type = other RNA
cctaaatgcatacaagagctg

SEQ ID NO: 18964 - RNA, 21 nt, synthetic construct
  source 1..21: mol_type = other RNA
cctaatgtttcagaaacagta

SEQ ID NO: 18965 - RNA, 21 nt, synthetic construct
  source 1..21: mol_type = other RNA
cctaatttcatgagctaaaaa

SEQ ID NO: 18966 - RNA, 21 nt, synthetic construct
  source 1..21: mol_type = other RNA
cctatcattaaggaaaggcta

SEQ ID NO: 18967 - RNA, 21 nt, synthetic construct
  source 1..21: mol_type = other RNA
cctatccctgttgtattttat

SEQ ID NO: 18968 - RNA, 21 nt, synthetic construct
  source 1..21: mol_type = other RNA
cctcaaacagagagttccagg

SEQ ID NO: 18969 - RNA, 21 nt, synthetic construct
  source 1..21: mol_type = other RNA
cctcacctatccctgttgtat

SEQ ID NO: 18970 - RNA, 21 nt, synthetic construct
  source 1..21: mol_type = other RNA
cctcagggatcagagcacaga

SEQ ID NO: 18971 - RNA, 21 nt, synthetic construct
  source 1..21: mol_type = other RNA
cctcccagacaaggaggagta

SEQ ID NO: 18972 - RNA, 21 nt, synthetic construct
  source 1..21: mol_type = other RNA
cctccttctccccacagcctc

SEQ ID NO: 18973 - RNA, 21 nt, synthetic construct
  source 1..21: mol_type = other RNA
cctccttgtctgggaggctgt

SEQ ID NO: 18974 - RNA, 21 nt, synthetic construct
  source 1..21: mol_type = other RNA
cctctcattttggaaagtact

SEQ ID NO: 18975 - RNA, 21 nt, synthetic construct
  source 1..21: mol_type = other RNA
cctctctgactttgtacctaa

SEQ ID NO: 18976 - RNA, 21 nt, synthetic construct
  source 1..21: mol_type = other RNA
cctcttcttagaaaagattac

SEQ ID NO: 18977 - RNA, 21 nt, synthetic construct
  source 1..21: mol_type = other RNA
cctcttgatggggctagtagc

SEQ ID NO: 18978 - RNA, 21 nt, synthetic construct
  source 1..21: mol_type = other RNA
cctgaggcatttaatatgttc

SEQ ID NO: 18979 - RNA, 21 nt, synthetic construct
  source 1..21: mol_type = other RNA
cctgcctggaactctctgttt

SEQ ID NO: 18980 - RNA, 21 nt, synthetic construct
  source 1..21: mol_type = other RNA
cctggaactctctgtttgagg

SEQ ID NO: 18981 - RNA, 21 nt, synthetic construct
  source 1..21: mol_type = other RNA
cctggctagtttacagcaatc

SEQ ID NO: 18982 - RNA, 21 nt, synthetic construct
  source 1..21: mol_type = other RNA
cctggtactcctccttctccc

SEQ ID NO: 18983 - RNA, 21 nt, synthetic construct
  source 1..21: mol_type = other RNA
cctgtctgatacttgtcctct

SEQ ID NO: 18984 - RNA, 21 nt, synthetic construct
  source 1..21: mol_type = other RNA
cctgtggatgctaattaaaac

SEQ ID NO: 18985 - RNA, 21 nt, synthetic construct
  source 1..21: mol_type = other RNA
cctgtgtgtgggttttgtttt

SEQ ID NO: 18986 - RNA, 21 nt, synthetic construct
  source 1..21: mol_type = other RNA
cctgttgtattttatcgggtc

SEQ ID NO: 18987 - RNA, 21 nt, synthetic construct
  source 1..21: mol_type = other RNA
ccttaaatggttgagttggac

SEQ ID NO: 18988 - RNA, 21 nt, synthetic construct
  source 1..21: mol_type = other RNA
ccttaatgatagggtgtttct

SEQ ID NO: 18989 - RNA, 21 nt, synthetic construct
  source 1..21: mol_type = other RNA
ccttccctcaaacagagagtt

SEQ ID NO: 18990 - RNA, 21 nt, synthetic construct
  source 1..21: mol_type = other RNA
ccttctccccacagcctccca

SEQ ID NO: 18991 - RNA, 21 nt, synthetic construct
  source 1..21: mol_type = other RNA
ccttgaccagatatatctctc

SEQ ID NO: 18992 - RNA, 21 nt, synthetic construct
  source 1..21: mol_type = other RNA
ccttgtctgggaggctgtggg

SEQ ID NO: 18993 - RNA, 21 nt, synthetic construct
  source 1..21: mol_type = other RNA
cctttccttaatgatagggtg

SEQ ID NO: 18994 - RNA, 21 nt, synthetic construct
  source 1..21: mol_type = other RNA
ccttttagtgatcatgtaccc

SEQ ID NO: 18995 - RNA, 21 nt, synthetic construct
  source 1..21: mol_type = other RNA
cgataaaatacaacagggata

SEQ ID NO: 18996 - RNA, 21 nt, synthetic construct
  source 1..21: mol_type = other RNA
cgcaaatcccactgtcacatg

SEQ ID NO: 18997 - RNA, 21 nt, synthetic construct
  source 1..21: mol_type = other RNA
cgccttccctcaaacagagag

SEQ ID NO: 18998 - RNA, 21 nt, synthetic construct
  source 1..21: mol_type = other RNA
cggcaagattttgtgagagca

SEQ ID NO: 18999 - RNA, 21 nt, synthetic construct
  source 1..21: mol_type = other RNA
cgggtccaactcaaccattta

SEQ ID NO: 19000 - RNA, 21 nt, synthetic construct
  source 1..21: mol_type = other RNA
cgttttaattagcatccacag

SEQ ID NO: 19001 - RNA, 21 nt, synthetic construct
  source 1..21: mol_type = other RNA
ctaaaaggcagctactcctcc

SEQ ID NO: 19002 - RNA, 21 nt, synthetic construct
  source 1..21: mol_type = other RNA
ctaaatatacagattgacact

SEQ ID NO: 19003 - RNA, 21 nt, synthetic construct
  source 1..21: mol_type = other RNA
ctaaatgcatacaagagctgg

SEQ ID NO: 19004 - RNA, 21 nt, synthetic construct
  source 1..21: mol_type = other RNA
ctaacacttctcttcattttc

SEQ ID NO: 19005 - RNA, 21 nt, synthetic construct
  source 1..21: mol_type = other RNA
ctaagaagaggacaagtatca

SEQ ID NO: 19006 - RNA, 21 nt, synthetic construct
  source 1..21: mol_type = other RNA
ctaagagagctctttgcatct

SEQ ID NO: 19007 - RNA, 21 nt, synthetic construct
  source 1..21: mol_type = other RNA
ctaatgaagacctgatttttt

SEQ ID NO: 19008 - RNA, 21 nt, synthetic construct
  source 1..21: mol_type = other RNA
ctaatgtttcagaaacagtac

SEQ ID NO: 19009 - RNA, 21 nt, synthetic construct
  source 1..21: mol_type = other RNA
ctaattaaaacgcaaatccca

SEQ ID NO: 19010 - RNA, 21 nt, synthetic construct
  source 1..21: mol_type = other RNA
ctactaaatatacagattgac

SEQ ID NO: 19011 - RNA, 21 nt, synthetic construct
  source 1..21: mol_type = other RNA
ctactagccccatcaagaggt

SEQ ID NO: 19012 - RNA, 21 nt, synthetic construct
  source 1..21: mol_type = other RNA
ctactcctccttgtctgggag

SEQ ID NO: 19013 - RNA, 21 nt, synthetic construct
  source 1..21: mol_type = other RNA
ctagaaacaccctatcattaa

SEQ ID NO: 19014 - RNA, 21 nt, synthetic construct
  source 1..21: mol_type = other RNA
ctagaccatccatggggaagt

SEQ ID NO: 19015 - RNA, 21 nt, synthetic construct
  source 1..21: mol_type = other RNA
ctagagagatatatctggtca

SEQ ID NO: 19016 - RNA, 21 nt, synthetic construct
  source 1..21: mol_type = other RNA
ctagccaggttgggaatatat

SEQ ID NO: 19017 - RNA, 21 nt, synthetic construct
  source 1..21: mol_type = other RNA
ctagccccatcaagaggtgga

SEQ ID NO: 19018 - RNA, 21 nt, synthetic construct
  source 1..21: mol_type = other RNA
ctagtagcctttccttaatga

SEQ ID NO: 19019 - RNA, 21 nt, synthetic construct
  source 1..21: mol_type = other RNA
ctagtcatgcctctcattttg

SEQ ID NO: 19020 - RNA, 21 nt, synthetic construct
  source 1..21: mol_type = other RNA
ctagtttacagcaatcacctg

SEQ ID NO: 19021 - RNA, 21 nt, synthetic construct
  source 1..21: mol_type = other RNA
ctatcattaaggaaaggctac

SEQ ID NO: 19022 - RNA, 21 nt, synthetic construct
  source 1..21: mol_type = other RNA
ctatccctgttgtattttatc

SEQ ID NO: 19023 - RNA, 21 nt, synthetic construct
  source 1..21: mol_type = other RNA
ctatggcaaatgggacagaac

SEQ ID NO: 19024 - RNA, 21 nt, synthetic construct
  source 1..21: mol_type = other RNA
ctcaaacagagagttccaggc

SEQ ID NO: 19025 - RNA, 21 nt, synthetic construct
  source 1..21: mol_type = other RNA
ctcaaccagttactggcttta

SEQ ID NO: 19026 - RNA, 21 nt, synthetic construct
  source 1..21: mol_type = other RNA
ctcaaccatttaaggtatttg

SEQ ID NO: 19027 - RNA, 21 nt, synthetic construct
  source 1..21: mol_type = other RNA
ctcacaaaatcttgccgcctt

SEQ ID NO: 19028 - RNA, 21 nt, synthetic construct
  source 1..21: mol_type = other RNA
ctcacctatccctgttgtatt

SEQ ID NO: 19029 - RNA, 21 nt, synthetic construct
  source 1..21: mol_type = other RNA
ctcagatgcaaagagctctct

SEQ ID NO: 19030 - RNA, 21 nt, synthetic construct
  source 1..21: mol_type = other RNA
ctcagggatcagagcacagat

SEQ ID NO: 19031 - RNA, 21 nt, synthetic construct
  source 1..21: mol_type = other RNA
ctcatgaaattaggtacaaag

SEQ ID NO: 19032 - RNA, 21 nt, synthetic construct
  source 1..21: mol_type = other RNA
ctcattttggaaagtactgtt

SEQ ID NO: 19033 - RNA, 21 nt, synthetic construct
  source 1..21: mol_type = other RNA
ctccaaaagtcataaagccag

SEQ ID NO: 19034 - RNA, 21 nt, synthetic construct
  source 1..21: mol_type = other RNA
ctccatttgatcataatggaa

SEQ ID NO: 19035 - RNA, 21 nt, synthetic construct
  source 1..21: mol_type = other RNA
ctcccagacaaggaggagtag

SEQ ID NO: 19036 - RNA, 21 nt, synthetic construct
  source 1..21: mol_type = other RNA
ctccccacagcctcccagaca

SEQ ID NO: 19037 - RNA, 21 nt, synthetic construct
  source 1..21: mol_type = other RNA
ctcctccttctccccacagcc

SEQ ID NO: 19038 - RNA, 21 nt, synthetic construct
  source 1..21: mol_type = other RNA
ctcctccttgtctgggaggct

SEQ ID NO: 19039 - RNA, 21 nt, synthetic construct
  source 1..21: mol_type = other RNA
ctccttctccccacagcctcc

SEQ ID NO: 19040 - RNA, 21 nt, synthetic construct
  source 1..21: mol_type = other RNA
ctccttgtctgggaggctgtg

SEQ ID NO: 19041 - RNA, 21 nt, synthetic construct
  source 1..21: mol_type = other RNA
ctctagaaacaccctatcatt

SEQ ID NO: 19042 - RNA, 21 nt, synthetic construct
  source 1..21: mol_type = other RNA
ctctcacaaaatcttgccgcc

SEQ ID NO: 19043 - RNA, 21 nt, synthetic construct
  source 1..21: mol_type = other RNA
ctctcattttggaaagtactg

SEQ ID NO: 19044 - RNA, 21 nt, synthetic construct
  source 1..21: mol_type = other RNA
ctctccaaaagtcataaagcc

SEQ ID NO: 19045 - RNA, 21 nt, synthetic construct
  source 1..21: mol_type = other RNA
ctctctagaaacaccctatca

SEQ ID NO: 19046 - RNA, 21 nt, synthetic construct
  source 1..21: mol_type = other RNA
ctctctgactttgtacctaat

SEQ ID NO: 19047 - RNA, 21 nt, synthetic construct
  source 1..21: mol_type = other RNA
ctctctgtttgagggaaggcg

SEQ ID NO: 19048 - RNA, 21 nt, synthetic construct
  source 1..21: mol_type = other RNA
ctctcttagcttttaatgtta

SEQ ID NO: 19049 - RNA, 21 nt, synthetic construct
  source 1..21: mol_type = other RNA
ctctgactttgtacctaattt

SEQ ID NO: 19050 - RNA, 21 nt, synthetic construct
  source 1..21: mol_type = other RNA
ctctgatccctgaggcattta

SEQ ID NO: 19051 - RNA, 21 nt, synthetic construct
  source 1..21: mol_type = other RNA
ctctgtttgagggaaggcggc

SEQ ID NO: 19052 - RNA, 21 nt, synthetic construct
  source 1..21: mol_type = other RNA
ctcttagcttttaatgttatg

SEQ ID NO: 19053 - RNA, 21 nt, synthetic construct
  source 1..21: mol_type = other RNA
ctcttcttagaaaagattaca

SEQ ID NO: 19054 - RNA, 21 nt, synthetic construct
  source 1..21: mol_type = other RNA
ctcttgatggggctagtagcc

SEQ ID NO: 19055 - RNA, 21 nt, synthetic construct
  source 1..21: mol_type = other RNA
ctcttgtatgcatttaggttt

SEQ ID NO: 19056 - RNA, 21 nt, synthetic construct
  source 1..21: mol_type = other RNA
ctctttgcatctgagcttcta

SEQ ID NO: 19057 - RNA, 21 nt, synthetic construct
  source 1..21: mol_type = other RNA
ctgaaaaattaatttatgccc

SEQ ID NO: 19058 - RNA, 21 nt, synthetic construct
  source 1..21: mol_type = other RNA
ctgaaacattaggcaatatat

SEQ ID NO: 19059 - RNA, 21 nt, synthetic construct
  source 1..21: mol_type = other RNA
ctgacctgtgtgtgggttttg

SEQ ID NO: 19060 - RNA, 21 nt, synthetic construct
  source 1..21: mol_type = other RNA
ctgactttgtacctaatttca

SEQ ID NO: 19061 - RNA, 21 nt, synthetic construct
  source 1..21: mol_type = other RNA
ctgagcttctaataataagaa

SEQ ID NO: 19062 - RNA, 21 nt, synthetic construct
  source 1..21: mol_type = other RNA
ctgaggcatttaatatgttct

SEQ ID NO: 19063 - RNA, 21 nt, synthetic construct
  source 1..21: mol_type = other RNA
ctgatacttgtcctcttctta

SEQ ID NO: 19064 - RNA, 21 nt, synthetic construct
  source 1..21: mol_type = other RNA
ctgatccctgaggcatttaat

SEQ ID NO: 19065 - RNA, 21 nt, synthetic construct
  source 1..21: mol_type = other RNA
ctgcctggaactctctgtttg

SEQ ID NO: 19066 - RNA, 21 nt, synthetic construct
  source 1..21: mol_type = other RNA
ctgccttttagtgatcatgta

SEQ ID NO: 19067 - RNA, 21 nt, synthetic construct
  source 1..21: mol_type = other RNA
ctggaactctctgtttgaggg

SEQ ID NO: 19068 - RNA, 21 nt, synthetic construct
  source 1..21: mol_type = other RNA
ctggcaaataccttaaatggt

SEQ ID NO: 19069 - RNA, 21 nt, synthetic construct
  source 1..21: mol_type = other RNA
ctggctagtttacagcaatca

SEQ ID NO: 19070 - RNA, 21 nt, synthetic construct
  source 1..21: mol_type = other RNA
ctggctttatgacttttggag

SEQ ID NO: 19071 - RNA, 21 nt, synthetic construct
  source 1..21: mol_type = other RNA
ctgggaggctgtggggagaag

SEQ ID NO: 19072 - RNA, 21 nt, synthetic construct
  source 1..21: mol_type = other RNA
ctgggtttgaatttgggctca

SEQ ID NO: 19073 - RNA, 21 nt, synthetic construct
  source 1..21: mol_type = other RNA
ctggtactcctccttctcccc

SEQ ID NO: 19074 - RNA, 21 nt, synthetic construct
  source 1..21: mol_type = other RNA
ctggtcaaggtggcctggtac

SEQ ID NO: 19075 - RNA, 21 nt, synthetic construct
  source 1..21: mol_type = other RNA
ctggttgagcccaaattcaaa

SEQ ID NO: 19076 - RNA, 21 nt, synthetic construct
  source 1..21: mol_type = other RNA
ctgtaaactagccaggttggg

SEQ ID NO: 19077 - RNA, 21 nt, synthetic construct
  source 1..21: mol_type = other RNA
ctgtaatcttttctaagaaga

SEQ ID NO: 19078 - RNA, 21 nt, synthetic construct
  source 1..21: mol_type = other RNA
ctgtatatttagtagcactaa

SEQ ID NO: 19079 - RNA, 21 nt, synthetic construct
  source 1..21: mol_type = other RNA
ctgtcacatgcattactccat

SEQ ID NO: 19080 - RNA, 21 nt, synthetic construct
  source 1..21: mol_type = other RNA
ctgtcccatttgccatagtcc

SEQ ID NO: 19081 - RNA, 21 nt, synthetic construct
  source 1..21: mol_type = other RNA
ctgtctgatacttgtcctctt

SEQ ID NO: 19082 - RNA, 21 nt, synthetic construct
  source 1..21: mol_type = other RNA
ctgtgctctgatccctgaggc

SEQ ID NO: 19083 - RNA, 21 nt, synthetic construct
  source 1..21: mol_type = other RNA
ctgtggatgctaattaaaacg

SEQ ID NO: 19084 - RNA, 21 nt, synthetic construct
  source 1..21: mol_type = other RNA
ctgtgggcataaattaatttt

SEQ ID NO: 19085 - RNA, 21 nt, synthetic construct
  source 1..21: mol_type = other RNA
ctgtggggagaaggaggagta

SEQ ID NO: 19086 - RNA, 21 nt, synthetic construct
  source 1..21: mol_type = other RNA
ctgtgtgtgggttttgttttt

SEQ ID NO: 19087 - RNA, 21 nt, synthetic construct
  source 1..21: mol_type = other RNA
ctgttgtattttatcgggtcc

SEQ ID NO: 19088 - RNA, 21 nt, synthetic construct
  source 1..21: mol_type = other RNA
ctgtttctgaaacattaggca

SEQ ID NO: 19089 - RNA, 21 nt, synthetic construct
  source 1..21: mol_type = other RNA
ctgtttgagggaaggcggcaa

SEQ ID NO: 19090 - RNA, 21 nt, synthetic construct
  source 1..21: mol_type = other RNA
cttaaataactctccaaaagt

SEQ ID NO: 19091 - RNA, 21 nt, synthetic construct
  source 1..21: mol_type = other RNA
cttaaatggttgagttggacc

SEQ ID NO: 19092 - RNA, 21 nt, synthetic construct
  source 1..21: mol_type = other RNA
cttaatgatagggtgtttcta

SEQ ID NO: 19093 - RNA, 21 nt, synthetic construct
  source 1..21: mol_type = other RNA
cttagaaaagattacagtgat

SEQ ID NO: 19094 - RNA, 21 nt, synthetic construct
  source 1..21: mol_type = other RNA
cttatattcagggtacatgat

SEQ ID NO: 19095 - RNA, 21 nt, synthetic construct
  source 1..21: mol_type = other RNA
cttattattagaagctcagat

SEQ ID NO: 19096 - RNA, 21 nt, synthetic construct
  source 1..21: mol_type = other RNA
cttcattagattccccaatcc

SEQ ID NO: 19097 - RNA, 21 nt, synthetic construct
  source 1..21: mol_type = other RNA
cttccaaaacttaactgaaaa

SEQ ID NO: 19098 - RNA, 21 nt, synthetic construct
  source 1..21: mol_type = other RNA
cttcccacttccccatggatg

SEQ ID NO: 19099 - RNA, 21 nt, synthetic construct
  source 1..21: mol_type = other RNA
cttccccatggatggtctagt

SEQ ID NO: 19100 - RNA, 21 nt, synthetic construct
  source 1..21: mol_type = other RNA
cttccctcaaacagagagttc

SEQ ID NO: 19101 - RNA, 21 nt, synthetic construct
  source 1..21: mol_type = other RNA
cttctccccacagcctcccag

SEQ ID NO: 19102 - RNA, 21 nt, synthetic construct
  source 1..21: mol_type = other RNA
cttctcttcattttcaatgaa

SEQ ID NO: 19103 - RNA, 21 nt, synthetic construct
  source 1..21: mol_type = other RNA
cttcttagaaaagattacagt

SEQ ID NO: 19104 - RNA, 21 nt, synthetic construct
  source 1..21: mol_type = other RNA
cttgaccagatatatctctct

SEQ ID NO: 19105 - RNA, 21 nt, synthetic construct
  source 1..21: mol_type = other RNA
cttgatggggctagtagcctt

SEQ ID NO: 19106 - RNA, 21 nt, synthetic construct
  source 1..21: mol_type = other RNA
cttgccgccttccctcaaaca

SEQ ID NO: 19107 - RNA, 21 nt, synthetic construct
  source 1..21: mol_type = other RNA
cttgtatgcatttaggttttg

SEQ ID NO: 19108 - RNA, 21 nt, synthetic construct
  source 1..21: mol_type = other RNA
cttgtcctcttcttagaaaag

SEQ ID NO: 19109 - RNA, 21 nt, synthetic construct
  source 1..21: mol_type = other RNA
cttgtctgggaggctgtgggg

SEQ ID NO: 19110 - RNA, 21 nt, synthetic construct
  source 1..21: mol_type = other RNA
ctttatgacttttggagagtt

SEQ ID NO: 19111 - RNA, 21 nt, synthetic construct
  source 1..21: mol_type = other RNA
ctttccaaaatgagaggcatg

SEQ ID NO: 19112 - RNA, 21 nt, synthetic construct
  source 1..21: mol_type = other RNA
ctttccattatgatcaaatgg

SEQ ID NO: 19113 - RNA, 21 nt, synthetic construct
  source 1..21: mol_type = other RNA
ctttccttaatgatagggtgt

SEQ ID NO: 19114 - RNA, 21 nt, synthetic construct
  source 1..21: mol_type = other RNA
ctttgcatctgagcttctaat

SEQ ID NO: 19115 - RNA, 21 nt, synthetic construct
  source 1..21: mol_type = other RNA
ctttgtacctaatttcatgag

SEQ ID NO: 19116 - RNA, 21 nt, synthetic construct
  source 1..21: mol_type = other RNA
ctttgttttttagctcatgaa

SEQ ID NO: 19117 - RNA, 21 nt, synthetic construct
  source 1..21: mol_type = other RNA
cttttagtgatcatgtaccct

SEQ ID NO: 19118 - RNA, 21 nt, synthetic construct
  source 1..21: mol_type = other RNA
cttttctaagaagaggacaag

SEQ ID NO: 19119 - RNA, 21 nt, synthetic construct
  source 1..21: mol_type = other RNA
cttttggagagttatttaagc

SEQ ID NO: 19120 - RNA, 21 nt, synthetic construct
  source 1..21: mol_type = other RNA
gaaaaattaatttatgcccac

SEQ ID NO: 19121 - RNA, 21 nt, synthetic construct
  source 1..21: mol_type = other RNA
gaaaagattacagtgatgctc

SEQ ID NO: 19122 - RNA, 21 nt, synthetic construct
  source 1..21: mol_type = other RNA
gaaaatgaagagaagtgttag

SEQ ID NO: 19123 - RNA, 21 nt, synthetic construct
  source 1..21: mol_type = other RNA
gaaacaaaacctaaatgcata

SEQ ID NO: 19124 - RNA, 21 nt, synthetic construct
  source 1..21: mol_type = other RNA
gaaacaccctatcattaagga

SEQ ID NO: 19125 - RNA, 21 nt, synthetic construct
  source 1..21: mol_type = other RNA
gaaacagtactttccaaaatg

SEQ ID NO: 19126 - RNA, 21 nt, synthetic construct
  source 1..21: mol_type = other RNA
gaaacattaggcaatatattc

SEQ ID NO: 19127 - RNA, 21 nt, synthetic construct
  source 1..21: mol_type = other RNA
gaaaggctactagccccatca

SEQ ID NO: 19128 - RNA, 21 nt, synthetic construct
  source 1..21: mol_type = other RNA
gaaagtactgtttctgaaaca

SEQ ID NO: 19129 - RNA, 21 nt, synthetic construct
  source 1..21: mol_type = other RNA
gaaagtatgttctgtcccatt

SEQ ID NO: 19130 - RNA, 21 nt, synthetic construct
  source 1..21: mol_type = other RNA
gaaattaggtacaaagtcaga

SEQ ID NO: 19131 - RNA, 21 nt, synthetic construct
  source 1..21: mol_type = other RNA
gaacatactttccattatgat

SEQ ID NO: 19132 - RNA, 21 nt, synthetic construct
  source 1..21: mol_type = other RNA
gaacatattaaatgcctcagg

SEQ ID NO: 19133 - RNA, 21 nt, synthetic construct
  source 1..21: mol_type = other RNA
gaactctctgtttgagggaag

SEQ ID NO: 19134 - RNA, 21 nt, synthetic construct
  source 1..21: mol_type = other RNA
gaagagaagtgttagtgctac

SEQ ID NO: 19135 - RNA, 21 nt, synthetic construct
  source 1..21: mol_type = other RNA
gaagaggacaagtatcagaca

SEQ ID NO: 19136 - RNA, 21 nt, synthetic construct
  source 1..21: mol_type = other RNA
gaagctcagatgcaaagagct

SEQ ID NO: 19137 - RNA, 21 nt, synthetic construct
  source 1..21: mol_type = other RNA
gaagcttaaataactctccaa

SEQ ID NO: 19138 - RNA, 21 nt, synthetic construct
  source 1..21: mol_type = other RNA
gaaggaggagtaccaggccac

SEQ ID NO: 19139 - RNA, 21 nt, synthetic construct
  source 1..21: mol_type = other RNA
gaaggcggcaagattttgtga

SEQ ID NO: 19140 - RNA, 21 nt, synthetic construct
  source 1..21: mol_type = other RNA
gaagtgggaagaaaatattat

SEQ ID NO: 19141 - RNA, 21 nt, synthetic construct
  source 1..21: mol_type = other RNA
gaagtgttagtgctactaaat

SEQ ID NO: 19142 - RNA, 21 nt, synthetic construct
  source 1..21: mol_type = other RNA
gaatatattgcctaatgtttc

SEQ ID NO: 19143 - RNA, 21 nt, synthetic construct
  source 1..21: mol_type = other RNA
gaatctaatgaagacctgatt

SEQ ID NO: 19144 - RNA, 21 nt, synthetic construct
  source 1..21: mol_type = other RNA
gaatctgtgctctgatccctg

SEQ ID NO: 19145 - RNA, 21 nt, synthetic construct
  source 1..21: mol_type = other RNA
gaatttgggctcaaccagtta

SEQ ID NO: 19146 - RNA, 21 nt, synthetic construct
  source 1..21: mol_type = other RNA
gacaaggaggagtagctgcct

SEQ ID NO: 19147 - RNA, 21 nt, synthetic construct
  source 1..21: mol_type = other RNA
gacaagtatcagacaggctgg

SEQ ID NO: 19148 - RNA, 21 nt, synthetic construct
  source 1..21: mol_type = other RNA
gacagaacatactttccatta

SEQ ID NO: 19149 - RNA, 21 nt, synthetic construct
  source 1..21: mol_type = other RNA
gacaggctgggtttgaatttg

SEQ ID NO: 19150 - RNA, 21 nt, synthetic construct
  source 1..21: mol_type = other RNA
gacagtgggatttgcgtttta

SEQ ID NO: 19151 - RNA, 21 nt, synthetic construct
  source 1..21: mol_type = other RNA
gaccagatatatctctctaga

SEQ ID NO: 19152 - RNA, 21 nt, synthetic construct
  source 1..21: mol_type = other RNA
gaccatccatggggaagtggg

SEQ ID NO: 19153 - RNA, 21 nt, synthetic construct
  source 1..21: mol_type = other RNA
gacccctctctgactttgtac

SEQ ID NO: 19154 - RNA, 21 nt, synthetic construct
  source 1..21: mol_type = other RNA
gacccgataaaatacaacagg

SEQ ID NO: 19155 - RNA, 21 nt, synthetic construct
  source 1..21: mol_type = other RNA
gacctgtgtgtgggttttgtt

SEQ ID NO: 19156 - RNA, 21 nt, synthetic construct
  source 1..21: mol_type = other RNA
gactagaccatccatggggaa

SEQ ID NO: 19157 - RNA, 21 nt, synthetic construct
  source 1..21: mol_type = other RNA
gactatggcaaatgggacaga

SEQ ID NO: 19158 - RNA, 21 nt, synthetic construct
  source 1..21: mol_type = other RNA
gactttgtacctaatttcatg

SEQ ID NO: 19159 - RNA, 21 nt, synthetic construct
  source 1..21: mol_type = other RNA
gacttttggagagttatttaa

SEQ ID NO: 19160 - RNA, 21 nt, synthetic construct
  source 1..21: mol_type = other RNA
gagaaggaggagtaccaggcc

SEQ ID NO: 19161 - RNA, 21 nt, synthetic construct
  source 1..21: mol_type = other RNA
gagaagtgttagtgctactaa

SEQ ID NO: 19162 - RNA, 21 nt, synthetic construct
  source 1..21: mol_type = other RNA
gagagatatatctggtcaagg

SEQ ID NO: 19163 - RNA, 21 nt, synthetic construct
  source 1..21: mol_type = other RNA
gagagcatcactgtaatcttt

SEQ ID NO: 19164 - RNA, 21 nt, synthetic construct
  source 1..21: mol_type = other RNA
gagagctctttgcatctgagc

SEQ ID NO: 19165 - RNA, 21 nt, synthetic construct
  source 1..21: mol_type = other RNA
gagaggcatgactagaccatc

SEQ ID NO: 19166 - RNA, 21 nt, synthetic construct
  source 1..21: mol_type = other RNA
gagagttatttaagcttccaa

SEQ ID NO: 19167 - RNA, 21 nt, synthetic construct
  source 1..21: mol_type = other RNA
gagagttccaggcaggatgaa

SEQ ID NO: 19168 - RNA, 21 nt, synthetic construct
  source 1..21: mol_type = other RNA
gagatatatctggtcaaggtg

SEQ ID NO: 19169 - RNA, 21 nt, synthetic construct
  source 1..21: mol_type = other RNA
gagcacagattcatcctgcct

SEQ ID NO: 19170 - RNA, 21 nt, synthetic construct
  source 1..21: mol_type = other RNA
gagcatcactgtaatcttttc

SEQ ID NO: 19171 - RNA, 21 nt, synthetic construct
  source 1..21: mol_type = other RNA
gagcccaaattcaaacccagc

SEQ ID NO: 19172 - RNA, 21 nt, synthetic construct
  source 1..21: mol_type = other RNA
gagctaaaaaacaaagaaaca

SEQ ID NO: 19173 - RNA, 21 nt, synthetic construct
  source 1..21: mol_type = other RNA
gagctctcttagcttttaatg

SEQ ID NO: 19174 - RNA, 21 nt, synthetic construct
  source 1..21: mol_type = other RNA
gagctctttgcatctgagctt

SEQ ID NO: 19175 - RNA, 21 nt, synthetic construct
  source 1..21: mol_type = other RNA
gagctggcaaataccttaaat

SEQ ID NO: 19176 - RNA, 21 nt, synthetic construct
  source 1..21: mol_type = other RNA
gagcttctaataataagaaca

SEQ ID NO: 19177 - RNA, 21 nt, synthetic construct
  source 1..21: mol_type = other RNA
gaggacaagtatcagacaggc

SEQ ID NO: 19178 - RNA, 21 nt, synthetic construct
  source 1..21: mol_type = other RNA
gaggactatggcaaatgggac

SEQ ID NO: 19179 - RNA, 21 nt, synthetic construct
  source 1..21: mol_type = other RNA
gaggagtaccaggccaccttg

SEQ ID NO: 19180 - RNA, 21 nt, synthetic construct
  source 1..21: mol_type = other RNA
gaggagtagctgccttttagt

SEQ ID NO: 19181 - RNA, 21 nt, synthetic construct
  source 1..21: mol_type = other RNA
gaggcatgactagaccatcca

SEQ ID NO: 19182 - RNA, 21 nt, synthetic construct
  source 1..21: mol_type = other RNA
gaggcatttaatatgttctta

SEQ ID NO: 19183 - RNA, 21 nt, synthetic construct
  source 1..21: mol_type = other RNA
gaggctgtggggagaaggagg

SEQ ID NO: 19184 - RNA, 21 nt, synthetic construct
  source 1..21: mol_type = other RNA
gagggaaggcggcaagatttt

SEQ ID NO: 19185 - RNA, 21 nt, synthetic construct
  source 1..21: mol_type = other RNA
gaggtggattggggaatctaa

SEQ ID NO: 19186 - RNA, 21 nt, synthetic construct
  source 1..21: mol_type = other RNA
gagtaatgcatgtgacagtgg

SEQ ID NO: 19187 - RNA, 21 nt, synthetic construct
  source 1..21: mol_type = other RNA
gagtaccaggccaccttgacc

SEQ ID NO: 19188 - RNA, 21 nt, synthetic construct
  source 1..21: mol_type = other RNA
gagtagctgccttttagtgat

SEQ ID NO: 19189 - RNA, 21 nt, synthetic construct
  source 1..21: mol_type = other RNA
gagttatttaagcttccaaaa

SEQ ID NO: 19190 - RNA, 21 nt, synthetic construct
  source 1..21: mol_type = other RNA
gagttccaggcaggatgaatc

SEQ ID NO: 19191 - RNA, 21 nt, synthetic construct
  source 1..21: mol_type = other RNA
gagttggacccgataaaatac

SEQ ID NO: 19192 - RNA, 21 nt, synthetic construct
  source 1..21: mol_type = other RNA
gataaaatacaacagggatag

SEQ ID NO: 19193 - RNA, 21 nt, synthetic construct
  source 1..21: mol_type = other RNA
gatacttgtcctcttcttaga

SEQ ID NO: 19194 - RNA, 21 nt, synthetic construct
  source 1..21: mol_type = other RNA
gatagggtgtttctagagaga

SEQ ID NO: 19195 - RNA, 21 nt, synthetic construct
  source 1..21: mol_type = other RNA
gataggtgaggactatggcaa

SEQ ID NO: 19196 - RNA, 21 nt, synthetic construct
  source 1..21: mol_type = other RNA
gatatatctctctagaaacac

SEQ ID NO: 19197 - RNA, 21 nt, synthetic construct
  source 1..21: mol_type = other RNA
gatatatctggtcaaggtggc

SEQ ID NO: 19198 - RNA, 21 nt, synthetic construct
  source 1..21: mol_type = other RNA
gatcaaatggagtaatgcatg

SEQ ID NO: 19199 - RNA, 21 nt, synthetic construct
  source 1..21: mol_type = other RNA
gatcactaaaaggcagctact

SEQ ID NO: 19200 - RNA, 21 nt, synthetic construct
  source 1..21: mol_type = other RNA
gatcagagcacagattcatcc

SEQ ID NO: 19201 - RNA, 21 nt, synthetic construct
  source 1..21: mol_type = other RNA
gatcataatggaaagtatgtt

SEQ ID NO: 19202 - RNA, 21 nt, synthetic construct
  source 1..21: mol_type = other RNA
gatcatgtaccctgaatataa

SEQ ID NO: 19203 - RNA, 21 nt, synthetic construct
  source 1..21: mol_type = other RNA
gatccctgaggcatttaatat

SEQ ID NO: 19204 - RNA, 21 nt, synthetic construct
  source 1..21: mol_type = other RNA
gatgaatctgtgctctgatcc

SEQ ID NO: 19205 - RNA, 21 nt, synthetic construct
  source 1..21: mol_type = other RNA
gatgcaaagagctctcttagc

SEQ ID NO: 19206 - RNA, 21 nt, synthetic construct
  source 1..21: mol_type = other RNA
gatgctaattaaaacgcaaat

SEQ ID NO: 19207 - RNA, 21 nt, synthetic construct
  source 1..21: mol_type = other RNA
gatgctctcacaaaatcttgc

SEQ ID NO: 19208 - RNA, 21 nt, synthetic construct
  source 1..21: mol_type = other RNA
gatggggctagtagcctttcc

SEQ ID NO: 19209 - RNA, 21 nt, synthetic construct
  source 1..21: mol_type = other RNA
gatggtctagtcatgcctctc

SEQ ID NO: 19210 - RNA, 21 nt, synthetic construct
  source 1..21: mol_type = other RNA
gattacagtgatgctctcaca

SEQ ID NO: 19211 - RNA, 21 nt, synthetic construct
  source 1..21: mol_type = other RNA
gattcatcctgcctggaactc

SEQ ID NO: 19212 - RNA, 21 nt, synthetic construct
  source 1..21: mol_type = other RNA
gattccccaatccacctcttg

SEQ ID NO: 19213 - RNA, 21 nt, synthetic construct
  source 1..21: mol_type = other RNA
gattgacactaaatatatgtg

SEQ ID NO: 19214 - RNA, 21 nt, synthetic construct
  source 1..21: mol_type = other RNA
gattgctgtaaactagccagg

SEQ ID NO: 19215 - RNA, 21 nt, synthetic construct
  source 1..21: mol_type = other RNA
gattggggaatctaatgaaga

SEQ ID NO: 19216 - RNA, 21 nt, synthetic construct
  source 1..21: mol_type = other RNA
gatttgcgttttaattagcat

SEQ ID NO: 19217 - RNA, 21 nt, synthetic construct
  source 1..21: mol_type = other RNA
gattttgtgagagcatcactg

SEQ ID NO: 19218 - RNA, 21 nt, synthetic construct
  source 1..21: mol_type = other RNA
gcaaagagctctcttagcttt

SEQ ID NO: 19219 - RNA, 21 nt, synthetic construct
  source 1..21: mol_type = other RNA
gcaaataccttaaatggttga

SEQ ID NO: 19220 - RNA, 21 nt, synthetic construct
  source 1..21: mol_type = other RNA
gcaaatcccactgtcacatgc

SEQ ID NO: 19221 - RNA, 21 nt, synthetic construct
  source 1..21: mol_type = other RNA
gcaaatgggacagaacatact

SEQ ID NO: 19222 - RNA, 21 nt, synthetic construct
  source 1..21: mol_type = other RNA
gcaagattttgtgagagcatc

SEQ ID NO: 19223 - RNA, 21 nt, synthetic construct
  source 1..21: mol_type = other RNA
gcaatatattcccaacctggc

SEQ ID NO: 19224 - RNA, 21 nt, synthetic construct
  source 1..21: mol_type = other RNA
gcaatcacctgtggatgctaa

SEQ ID NO: 19225 - RNA, 21 nt, synthetic construct
  source 1..21: mol_type = other RNA
gcacagattcatcctgcctgg

SEQ ID NO: 19226 - RNA, 21 nt, synthetic construct
  source 1..21: mol_type = other RNA
gcactaacacttctcttcatt

SEQ ID NO: 19227 - RNA, 21 nt, synthetic construct
  source 1..21: mol_type = other RNA
gcagctactcctccttgtctg

SEQ ID NO: 19228 - RNA, 21 nt, synthetic construct
  source 1..21: mol_type = other RNA
gcaggatgaatctgtgctctg

SEQ ID NO: 19229 - RNA, 21 nt, synthetic construct
  source 1..21: mol_type = other RNA
gcatacaagagctggcaaata

SEQ ID NO: 19230 - RNA, 21 nt, synthetic construct
  source 1..21: mol_type = other RNA
gcatcactgtaatcttttcta

SEQ ID NO: 19231 - RNA, 21 nt, synthetic construct
  source 1..21: mol_type = other RNA
gcatccacaggtgattgctgt

SEQ ID NO: 19232 - RNA, 21 nt, synthetic construct
  source 1..21: mol_type = other RNA
gcatctgagcttctaataata

SEQ ID NO: 19233 - RNA, 21 nt, synthetic construct
  source 1..21: mol_type = other RNA
gcatgactagaccatccatgg

SEQ ID NO: 19234 - RNA, 21 nt, synthetic construct
  source 1..21: mol_type = other RNA
gcatgtgacagtgggatttgc

SEQ ID NO: 19235 - RNA, 21 nt, synthetic construct
  source 1..21: mol_type = other RNA
gcattactccatttgatcata

SEQ ID NO: 19236 - RNA, 21 nt, synthetic construct
  source 1..21: mol_type = other RNA
gcatttaggttttgtttcttt

SEQ ID NO: 19237 - RNA, 21 nt, synthetic construct
  source 1..21: mol_type = other RNA
gccaccttgaccagatatatc

SEQ ID NO: 19238 - RNA, 21 nt, synthetic construct
  source 1..21: mol_type = other RNA
gccagacccctctctgacttt

SEQ ID NO: 19239 - RNA, 21 nt, synthetic construct
  source 1..21: mol_type = other RNA
gccagctcttgtatgcattta

SEQ ID NO: 19240 - RNA, 21 nt, synthetic construct
  source 1..21: mol_type = other RNA
gccaggttgggaatatattgc

SEQ ID NO: 19241 - RNA, 21 nt, synthetic construct
  source 1..21: mol_type = other RNA
gccagtaactggttgagccca

SEQ ID NO: 19242 - RNA, 21 nt, synthetic construct
  source 1..21: mol_type = other RNA
gccatagtcctcacctatccc

SEQ ID NO: 19243 - RNA, 21 nt, synthetic construct
  source 1..21: mol_type = other RNA
gcccaaattcaaacccagcct

SEQ ID NO: 19244 - RNA, 21 nt, synthetic construct
  source 1..21: mol_type = other RNA
gcccacagtaaaacaaaaaca

SEQ ID NO: 19245 - RNA, 21 nt, synthetic construct
  source 1..21: mol_type = other RNA
gccccatcaagaggtggattg

SEQ ID NO: 19246 - RNA, 21 nt, synthetic construct
  source 1..21: mol_type = other RNA
gccgccttccctcaaacagag

SEQ ID NO: 19247 - RNA, 21 nt, synthetic construct
  source 1..21: mol_type = other RNA
gcctaatgtttcagaaacagt

SEQ ID NO: 19248 - RNA, 21 nt, synthetic construct
  source 1..21: mol_type = other RNA
gcctcagggatcagagcacag

SEQ ID NO: 19249 - RNA, 21 nt, synthetic construct
  source 1..21: mol_type = other RNA
gcctcccagacaaggaggagt

SEQ ID NO: 19250 - RNA, 21 nt, synthetic construct
  source 1..21: mol_type = other RNA
gcctctcattttggaaagtac

SEQ ID NO: 19251 - RNA, 21 nt, synthetic construct
  source 1..21: mol_type = other RNA
gcctggaactctctgtttgag

SEQ ID NO: 19252 - RNA, 21 nt, synthetic construct
  source 1..21: mol_type = other RNA
gcctggtactcctccttctcc

SEQ ID NO: 19253 - RNA, 21 nt, synthetic construct
  source 1..21: mol_type = other RNA
gcctgtctgatacttgtcctc

SEQ ID NO: 19254 - RNA, 21 nt, synthetic construct
  source 1..21: mol_type = other RNA
gccttccctcaaacagagagt

SEQ ID NO: 19255 - RNA, 21 nt, synthetic construct
  source 1..21: mol_type = other RNA
gcctttccttaatgatagggt

SEQ ID NO: 19256 - RNA, 21 nt, synthetic construct
  source 1..21: mol_type = other RNA
gccttttagtgatcatgtacc

SEQ ID NO: 19257 - RNA, 21 nt, synthetic construct
  source 1..21: mol_type = other RNA
gcggcaagattttgtgagagc

SEQ ID NO: 19258 - RNA, 21 nt, synthetic construct
  source 1..21: mol_type = other RNA
gcgttttaattagcatccaca

SEQ ID NO: 19259 - RNA, 21 nt, synthetic construct
  source 1..21: mol_type = other RNA
gctaagagagctctttgcatc

SEQ ID NO: 19260 - RNA, 21 nt, synthetic construct
  source 1..21: mol_type = other RNA
gctaattaaaacgcaaatccc

SEQ ID NO: 19261 - RNA, 21 nt, synthetic construct
  source 1..21: mol_type = other RNA
gctactaaatatacagattga

SEQ ID NO: 19262 - RNA, 21 nt, synthetic construct
  source 1..21: mol_type = other RNA
gctactagccccatcaagagg

SEQ ID NO: 19263 - RNA, 21 nt, synthetic construct
  source 1..21: mol_type = other RNA
gctactcctccttgtctggga

SEQ ID NO: 19264 - RNA, 21 nt, synthetic construct
  source 1..21: mol_type = other RNA
gctagtagcctttccttaatg

SEQ ID NO: 19265 - RNA, 21 nt, synthetic construct
  source 1..21: mol_type = other RNA
gctagtttacagcaatcacct

SEQ ID NO: 19266 - RNA, 21 nt, synthetic construct
  source 1..21: mol_type = other RNA
gctcaaccagttactggcttt

SEQ ID NO: 19267 - RNA, 21 nt, synthetic construct
  source 1..21: mol_type = other RNA
gctcagatgcaaagagctctc

SEQ ID NO: 19268 - RNA, 21 nt, synthetic construct
  source 1..21: mol_type = other RNA
gctcatgaaattaggtacaaa

SEQ ID NO: 19269 - RNA, 21 nt, synthetic construct
  source 1..21: mol_type = other RNA
gctctcacaaaatcttgccgc

SEQ ID NO: 19270 - RNA, 21 nt, synthetic construct
  source 1..21: mol_type = other RNA
gctctcttagcttttaatgtt

SEQ ID NO: 19271 - RNA, 21 nt, synthetic construct
  source 1..21: mol_type = other RNA
gctctgatccctgaggcattt

SEQ ID NO: 19272 - RNA, 21 nt, synthetic construct
  source 1..21: mol_type = other RNA
gctcttgtatgcatttaggtt

SEQ ID NO: 19273 - RNA, 21 nt, synthetic construct
  source 1..21: mol_type = other RNA
gctctttgcatctgagcttct

SEQ ID NO: 19274 - RNA, 21 nt, synthetic construct
  source 1..21: mol_type = other RNA
gctgccttttagtgatcatgt

SEQ ID NO: 19275 - RNA, 21 nt, synthetic construct
  source 1..21: mol_type = other RNA
gctggcaaataccttaaatgg

SEQ ID NO: 19276 - RNA, 21 nt, synthetic construct
  source 1..21: mol_type = other RNA
gctgggtttgaatttgggctc

SEQ ID NO: 19277 - RNA, 21 nt, synthetic construct
  source 1..21: mol_type = other RNA
gctgtaaactagccaggttgg

SEQ ID NO: 19278 - RNA, 21 nt, synthetic construct
  source 1..21: mol_type = other RNA
gctgtggggagaaggaggagt

SEQ ID NO: 19279 - RNA, 21 nt, synthetic construct
  source 1..21: mol_type = other RNA
gcttaaataactctccaaaag

SEQ ID NO: 19280 - RNA, 21 nt, synthetic construct
  source 1..21: mol_type = other RNA
gcttccaaaacttaactgaaa

SEQ ID NO: 19281 - RNA, 21 nt, synthetic construct
  source 1..21: mol_type = other RNA
gctttatgacttttggagagt

SEQ ID NO: 19282 - RNA, 21 nt, synthetic construct
  source 1..21: mol_type = other RNA
ggaaaggctactagccccatc

SEQ ID NO: 19283 - RNA, 21 nt, synthetic construct
  source 1..21: mol_type = other RNA
ggaaagtactgtttctgaaac

SEQ ID NO: 19284 - RNA, 21 nt, synthetic construct
  source 1..21: mol_type = other RNA
ggaaagtatgttctgtcccat

SEQ ID NO: 19285 - RNA, 21 nt, synthetic construct
  source 1..21: mol_type = other RNA
ggaactctctgtttgagggaa

SEQ ID NO: 19286 - RNA, 21 nt, synthetic construct
  source 1..21: mol_type = other RNA
ggaagcttaaataactctcca

SEQ ID NO: 19287 - RNA, 21 nt, synthetic construct
  source 1..21: mol_type = other RNA
ggaaggcggcaagattttgtg

SEQ ID NO: 19288 - RNA, 21 nt, synthetic construct
  source 1..21: mol_type = other RNA
ggaagtgggaagaaaatatta

SEQ ID NO: 19289 - RNA, 21 nt, synthetic construct
  source 1..21: mol_type = other RNA
ggaatatattgcctaatgttt

SEQ ID NO: 19290 - RNA, 21 nt, synthetic construct
  source 1..21: mol_type = other RNA
ggaatctaatgaagacctgat

SEQ ID NO: 19291 - RNA, 21 nt, synthetic construct
  source 1..21: mol_type = other RNA
ggacaagtatcagacaggctg

SEQ ID NO: 19292 - RNA, 21 nt, synthetic construct
  source 1..21: mol_type = other RNA
ggacagaacatactttccatt

SEQ ID NO: 19293 - RNA, 21 nt, synthetic construct
  source 1..21: mol_type = other RNA
ggacccgataaaatacaacag

SEQ ID NO: 19294 - RNA, 21 nt, synthetic construct
  source 1..21: mol_type = other RNA
ggactatggcaaatgggacag

SEQ ID NO: 19295 - RNA, 21 nt, synthetic construct
  source 1..21: mol_type = other RNA
ggagaaggaggagtaccaggc

SEQ ID NO: 19296 - RNA, 21 nt, synthetic construct
  source 1..21: mol_type = other RNA
ggagagttatttaagcttcca

SEQ ID NO: 19297 - RNA, 21 nt, synthetic construct
  source 1..21: mol_type = other RNA
ggaggagtaccaggccacctt

SEQ ID NO: 19298 - RNA, 21 nt, synthetic construct
  source 1..21: mol_type = other RNA
ggaggagtagctgccttttag

SEQ ID NO: 19299 - RNA, 21 nt, synthetic construct
  source 1..21: mol_type = other RNA
ggaggctgtggggagaaggag

SEQ ID NO: 19300 - RNA, 21 nt, synthetic construct
  source 1..21: mol_type = other RNA
ggagtaatgcatgtgacagtg

SEQ ID NO: 19301 - RNA, 21 nt, synthetic construct
  source 1..21: mol_type = other RNA
ggagtaccaggccaccttgac

SEQ ID NO: 19302 - RNA, 21 nt, synthetic construct
  source 1..21: mol_type = other RNA
ggagtagctgccttttagtga

SEQ ID NO: 19303 - RNA, 21 nt, synthetic construct
  source 1..21: mol_type = other RNA
ggataggtgaggactatggca

SEQ ID NO: 19304 - RNA, 21 nt, synthetic construct
  source 1..21: mol_type = other RNA
ggatcagagcacagattcatc

SEQ ID NO: 19305 - RNA, 21 nt, synthetic construct
  source 1..21: mol_type = other RNA
ggatgaatctgtgctctgatc

SEQ ID NO: 19306 - RNA, 21 nt, synthetic construct
  source 1..21: mol_type = other RNA
ggatgctaattaaaacgcaaa

SEQ ID NO: 19307 - RNA, 21 nt, synthetic construct
  source 1..21: mol_type = other RNA
ggatggtctagtcatgcctct

SEQ ID NO: 19308 - RNA, 21 nt, synthetic construct
  source 1..21: mol_type = other RNA
ggattggggaatctaatgaag

SEQ ID NO: 19309 - RNA, 21 nt, synthetic construct
  source 1..21: mol_type = other RNA
ggatttgcgttttaattagca

SEQ ID NO: 19310 - RNA, 21 nt, synthetic construct
  source 1..21: mol_type = other RNA
ggcaaataccttaaatggttg

SEQ ID NO: 19311 - RNA, 21 nt, synthetic construct
  source 1..21: mol_type = other RNA
ggcaaatgggacagaacatac

SEQ ID NO: 19312 - RNA, 21 nt, synthetic construct
  source 1..21: mol_type = other RNA
ggcaagattttgtgagagcat

SEQ ID NO: 19313 - RNA, 21 nt, synthetic construct
  source 1..21: mol_type = other RNA
ggcaatatattcccaacctgg

SEQ ID NO: 19314 - RNA, 21 nt, synthetic construct
  source 1..21: mol_type = other RNA
ggcagctactcctccttgtct

SEQ ID NO: 19315 - RNA, 21 nt, synthetic construct
  source 1..21: mol_type = other RNA
ggcaggatgaatctgtgctct

SEQ ID NO: 19316 - RNA, 21 nt, synthetic construct
  source 1..21: mol_type = other RNA
ggcatgactagaccatccatg

SEQ ID NO: 19317 - RNA, 21 nt, synthetic construct
  source 1..21: mol_type = other RNA
ggccaccttgaccagatatat

SEQ ID NO: 19318 - RNA, 21 nt, synthetic construct
  source 1..21: mol_type = other RNA
ggcctggtactcctccttctc

SEQ ID NO: 19319 - RNA, 21 nt, synthetic construct
  source 1..21: mol_type = other RNA
ggcggcaagattttgtgagag

SEQ ID NO: 19320 - RNA, 21 nt, synthetic construct
  source 1..21: mol_type = other RNA
ggctactagccccatcaagag

SEQ ID NO: 19321 - RNA, 21 nt, synthetic construct
  source 1..21: mol_type = other RNA
ggctagtagcctttccttaat

SEQ ID NO: 19322 - RNA, 21 nt, synthetic construct
  source 1..21: mol_type = other RNA
ggctagtttacagcaatcacc

SEQ ID NO: 19323 - RNA, 21 nt, synthetic construct
  source 1..21: mol_type = other RNA
ggctcaaccagttactggctt

SEQ ID NO: 19324 - RNA, 21 nt, synthetic construct
  source 1..21: mol_type = other RNA
ggctgggtttgaatttgggct

SEQ ID NO: 19325 - RNA, 21 nt, synthetic construct
  source 1..21: mol_type = other RNA
ggctgtggggagaaggaggag

SEQ ID NO: 19326 - RNA, 21 nt, synthetic construct
  source 1..21: mol_type = other RNA
ggctttatgacttttggagag

SEQ ID NO: 19327 - RNA, 21 nt, synthetic construct
  source 1..21: mol_type = other RNA
gggaaggcggcaagattttgt

SEQ ID NO: 19328 - RNA, 21 nt, synthetic construct
  source 1..21: mol_type = other RNA
gggaagtgggaagaaaatatt

SEQ ID NO: 19329 - RNA, 21 nt, synthetic construct
  source 1..21: mol_type = other RNA
gggaatatattgcctaatgtt

SEQ ID NO: 19330 - RNA, 21 nt, synthetic construct
  source 1..21: mol_type = other RNA
gggaatctaatgaagacctga

SEQ ID NO: 19331 - RNA, 21 nt, synthetic construct
  source 1..21: mol_type = other RNA
gggacagaacatactttccat

SEQ ID NO: 19332 - RNA, 21 nt, synthetic construct
  source 1..21: mol_type = other RNA
gggagaaggaggagtaccagg

SEQ ID NO: 19333 - RNA, 21 nt, synthetic construct
  source 1..21: mol_type = other RNA
gggaggctgtggggagaagga

SEQ ID NO: 19334 - RNA, 21 nt, synthetic construct
  source 1..21: mol_type = other RNA
gggataggtgaggactatggc

SEQ ID NO: 19335 - RNA, 21 nt, synthetic construct
  source 1..21: mol_type = other RNA
gggatcagagcacagattcat

SEQ ID NO: 19336 - RNA, 21 nt, synthetic construct
  source 1..21: mol_type = other RNA
gggatttgcgttttaattagc

SEQ ID NO: 19337 - RNA, 21 nt, synthetic construct
  source 1..21: mol_type = other RNA
gggcataaattaatttttcag

SEQ ID NO: 19338 - RNA, 21 nt, synthetic construct
  source 1..21: mol_type = other RNA
gggctagtagcctttccttaa

SEQ ID NO: 19339 - RNA, 21 nt, synthetic construct
  source 1..21: mol_type = other RNA
gggctcaaccagttactggct

SEQ ID NO: 19340 - RNA, 21 nt, synthetic construct
  source 1..21: mol_type = other RNA
ggggaagtgggaagaaaatat

SEQ ID NO: 19341 - RNA, 21 nt, synthetic construct
  source 1..21: mol_type = other RNA
ggggaatctaatgaagacctg

SEQ ID NO: 19342 - RNA, 21 nt, synthetic construct
  source 1..21: mol_type = other RNA
ggggagaaggaggagtaccag

SEQ ID NO: 19343 - RNA, 21 nt, synthetic construct
  source 1..21: mol_type = other RNA
ggggctagtagcctttcctta

SEQ ID NO: 19344 - RNA, 21 nt, synthetic construct
  source 1..21: mol_type = other RNA
gggtacatgatcactaaaagg

SEQ ID NO: 19345 - RNA, 21 nt, synthetic construct
  source 1..21: mol_type = other RNA
gggtccaactcaaccatttaa

SEQ ID NO: 19346 - RNA, 21 nt, synthetic construct
  source 1..21: mol_type = other RNA
gggtgtttctagagagatata

SEQ ID NO: 19347 - RNA, 21 nt, synthetic construct
  source 1..21: mol_type = other RNA
gggtttgaatttgggctcaac

SEQ ID NO: 19348 - RNA, 21 nt, synthetic construct
  source 1..21: mol_type = other RNA
gggttttgtttttgttttact

SEQ ID NO: 19349 - RNA, 21 nt, synthetic construct
  source 1..21: mol_type = other RNA
ggtacaaagtcagagaggggt

SEQ ID NO: 19350 - RNA, 21 nt, synthetic construct
  source 1..21: mol_type = other RNA
ggtacatgatcactaaaaggc

SEQ ID NO: 19351 - RNA, 21 nt, synthetic construct
  source 1..21: mol_type = other RNA
ggtactcctccttctccccac

SEQ ID NO: 19352 - RNA, 21 nt, synthetic construct
  source 1..21: mol_type = other RNA
ggtatttgccagctcttgtat

SEQ ID NO: 19353 - RNA, 21 nt, synthetic construct
  source 1..21: mol_type = other RNA
ggtcaaggtggcctggtactc

SEQ ID NO: 19354 - RNA, 21 nt, synthetic construct
  source 1..21: mol_type = other RNA
ggtccaactcaaccatttaag

SEQ ID NO: 19355 - RNA, 21 nt, synthetic construct
  source 1..21: mol_type = other RNA
ggtctagtcatgcctctcatt

SEQ ID NO: 19356 - RNA, 21 nt, synthetic construct
  source 1..21: mol_type = other RNA
ggtcttcattagattccccaa

SEQ ID NO: 19357 - RNA, 21 nt, synthetic construct
  source 1..21: mol_type = other RNA
ggtgaggactatggcaaatgg

SEQ ID NO: 19358 - RNA, 21 nt, synthetic construct
  source 1..21: mol_type = other RNA
ggtgattgctgtaaactagcc

SEQ ID NO: 19359 - RNA, 21 nt, synthetic construct
  source 1..21: mol_type = other RNA
ggtggattggggaatctaatg

SEQ ID NO: 19360 - RNA, 21 nt, synthetic construct
  source 1..21: mol_type = other RNA
ggtggcctggtactcctcctt

SEQ ID NO: 19361 - RNA, 21 nt, synthetic construct
  source 1..21: mol_type = other RNA
ggtgtttctagagagatatat

SEQ ID NO: 19362 - RNA, 21 nt, synthetic construct
  source 1..21: mol_type = other RNA
ggttgagcccaaattcaaacc

SEQ ID NO: 19363 - RNA, 21 nt, synthetic construct
  source 1..21: mol_type = other RNA
ggttgagttggacccgataaa

SEQ ID NO: 19364 - RNA, 21 nt, synthetic construct
  source 1..21: mol_type = other RNA
ggttgggaatatattgcctaa

SEQ ID NO: 19365 - RNA, 21 nt, synthetic construct
  source 1..21: mol_type = other RNA
ggtttgaatttgggctcaacc

SEQ ID NO: 19366 - RNA, 21 nt, synthetic construct
  source 1..21: mol_type = other RNA
ggttttgtttttgttttactg

SEQ ID NO: 19367 - RNA, 21 nt, synthetic construct
  source 1..21: mol_type = other RNA
gtaaaacaaaaacaaaaccca

SEQ ID NO: 19368 - RNA, 21 nt, synthetic construct
  source 1..21: mol_type = other RNA
gtaaactagccaggttgggaa

SEQ ID NO: 19369 - RNA, 21 nt, synthetic construct
  source 1..21: mol_type = other RNA
gtaactggttgagcccaaatt

SEQ ID NO: 19370 - RNA, 21 nt, synthetic construct
  source 1..21: mol_type = other RNA
gtaatcttttctaagaagagg

SEQ ID NO: 19371 - RNA, 21 nt, synthetic construct
  source 1..21: mol_type = other RNA
gtaatgcatgtgacagtggga

SEQ ID NO: 19372 - RNA, 21 nt, synthetic construct
  source 1..21: mol_type = other RNA
gtacaaagtcagagaggggtc

SEQ ID NO: 19373 - RNA, 21 nt, synthetic construct
  source 1..21: mol_type = other RNA
gtacatgatcactaaaaggca

SEQ ID NO: 19374 - RNA, 21 nt, synthetic construct
  source 1..21: mol_type = other RNA
gtaccaggccaccttgaccag

SEQ ID NO: 19375 - RNA, 21 nt, synthetic construct
  source 1..21: mol_type = other RNA
gtaccctgaatataagtgtat

SEQ ID NO: 19376 - RNA, 21 nt, synthetic construct
  source 1..21: mol_type = other RNA
gtacctaatttcatgagctaa

SEQ ID NO: 19377 - RNA, 21 nt, synthetic construct
  source 1..21: mol_type = other RNA
gtactcctccttctccccaca

SEQ ID NO: 19378 - RNA, 21 nt, synthetic construct
  source 1..21: mol_type = other RNA
gtactgtttctgaaacattag

SEQ ID NO: 19379 - RNA, 21 nt, synthetic construct
  source 1..21: mol_type = other RNA
gtactttccaaaatgagaggc

SEQ ID NO: 19380 - RNA, 21 nt, synthetic construct
  source 1..21: mol_type = other RNA
gtagcactaacacttctcttc

SEQ ID NO: 19381 - RNA, 21 nt, synthetic construct
  source 1..21: mol_type = other RNA
gtagcctttccttaatgatag

SEQ ID NO: 19382 - RNA, 21 nt, synthetic construct
  source 1..21: mol_type = other RNA
gtagctgccttttagtgatca

SEQ ID NO: 19383 - RNA, 21 nt, synthetic construct
  source 1..21: mol_type = other RNA
gtatatttagtagcactaaca

SEQ ID NO: 19384 - RNA, 21 nt, synthetic construct
  source 1..21: mol_type = other RNA
gtatcagacaggctgggtttg

SEQ ID NO: 19385 - RNA, 21 nt, synthetic construct
  source 1..21: mol_type = other RNA
gtatgcatttaggttttgttt

SEQ ID NO: 19386 - RNA, 21 nt, synthetic construct
  source 1..21: mol_type = other RNA
gtatgttctgtcccatttgcc

SEQ ID NO: 19387 - RNA, 21 nt, synthetic construct
  source 1..21: mol_type = other RNA
gtatttgccagctcttgtatg

SEQ ID NO: 19388 - RNA, 21 nt, synthetic construct
  source 1..21: mol_type = other RNA
gtattttatcgggtccaactc

SEQ ID NO: 19389 - RNA, 21 nt, synthetic construct
  source 1..21: mol_type = other RNA
gtcaaggtggcctggtactcc

SEQ ID NO: 19390 - RNA, 21 nt, synthetic construct
  source 1..21: mol_type = other RNA
gtcaatctgtatatttagtag

SEQ ID NO: 19391 - RNA, 21 nt, synthetic construct
  source 1..21: mol_type = other RNA
gtcacatgcattactccattt

SEQ ID NO: 19392 - RNA, 21 nt, synthetic construct
  source 1..21: mol_type = other RNA
gtcataaagccagtaactggt

SEQ ID NO: 19393 - RNA, 21 nt, synthetic construct
  source 1..21: mol_type = other RNA
gtcatgcctctcattttggaa

SEQ ID NO: 19394 - RNA, 21 nt, synthetic construct
  source 1..21: mol_type = other RNA
gtccaactcaaccatttaagg

SEQ ID NO: 19395 - RNA, 21 nt, synthetic construct
  source 1..21: mol_type = other RNA
gtcccatttgccatagtcctc

SEQ ID NO: 19396 - RNA, 21 nt, synthetic construct
  source 1..21: mol_type = other RNA
gtcctcacctatccctgttgt

SEQ ID NO: 19397 - RNA, 21 nt, synthetic construct
  source 1..21: mol_type = other RNA
gtcctcttcttagaaaagatt

SEQ ID NO: 19398 - RNA, 21 nt, synthetic construct
  source 1..21: mol_type = other RNA
gtctagtcatgcctctcattt

SEQ ID NO: 19399 - RNA, 21 nt, synthetic construct
  source 1..21: mol_type = other RNA
gtctgatacttgtcctcttct

SEQ ID NO: 19400 - RNA, 21 nt, synthetic construct
  source 1..21: mol_type = other RNA
gtctgggaggctgtggggaga

SEQ ID NO: 19401 - RNA, 21 nt, synthetic construct
  source 1..21: mol_type = other RNA
gtcttcattagattccccaat

SEQ ID NO: 19402 - RNA, 21 nt, synthetic construct
  source 1..21: mol_type = other RNA
gtgacagtgggatttgcgttt

SEQ ID NO: 19403 - RNA, 21 nt, synthetic construct
  source 1..21: mol_type = other RNA
gtgagagcatcactgtaatct

SEQ ID NO: 19404 - RNA, 21 nt, synthetic construct
  source 1..21: mol_type = other RNA
gtgaggactatggcaaatggg

SEQ ID NO: 19405 - RNA, 21 nt, synthetic construct
  source 1..21: mol_type = other RNA
gtgatcatgtaccctgaatat

SEQ ID NO: 19406 - RNA, 21 nt, synthetic construct
  source 1..21: mol_type = other RNA
gtgatgctctcacaaaatctt

SEQ ID NO: 19407 - RNA, 21 nt, synthetic construct
  source 1..21: mol_type = other RNA
gtgattgctgtaaactagcca

SEQ ID NO: 19408 - RNA, 21 nt, synthetic construct
  source 1..21: mol_type = other RNA
gtgctactaaatatacagatt

SEQ ID NO: 19409 - RNA, 21 nt, synthetic construct
  source 1..21: mol_type = other RNA
gtgctctgatccctgaggcat

SEQ ID NO: 19410 - RNA, 21 nt, synthetic construct
  source 1..21: mol_type = other RNA
gtggatgctaattaaaacgca

SEQ ID NO: 19411 - RNA, 21 nt, synthetic construct
  source 1..21: mol_type = other RNA
gtggattggggaatctaatga

SEQ ID NO: 19412 - RNA, 21 nt, synthetic construct
  source 1..21: mol_type = other RNA
gtggcctggtactcctccttc

SEQ ID NO: 19413 - RNA, 21 nt, synthetic construct
  source 1..21: mol_type = other RNA
gtgggatttgcgttttaatta

SEQ ID NO: 19414 - RNA, 21 nt, synthetic construct
  source 1..21: mol_type = other RNA
gtgggcataaattaatttttc

SEQ ID NO: 19415 - RNA, 21 nt, synthetic construct
  source 1..21: mol_type = other RNA
gtggggagaaggaggagtacc

SEQ ID NO: 19416 - RNA, 21 nt, synthetic construct
  source 1..21: mol_type = other RNA
gtgggttttgtttttgtttta

SEQ ID NO: 19417 - RNA, 21 nt, synthetic construct
  source 1..21: mol_type = other RNA
gtgtcaatctgtatatttagt

SEQ ID NO: 19418 - RNA, 21 nt, synthetic construct
  source 1..21: mol_type = other RNA
gtgtgggttttgtttttgttt

SEQ ID NO: 19419 - RNA, 21 nt, synthetic construct
  source 1..21: mol_type = other RNA
gtgtgtgggttttgtttttgt

SEQ ID NO: 19420 - RNA, 21 nt, synthetic construct
  source 1..21: mol_type = other RNA
gtgttagtgctactaaatata

SEQ ID NO: 19421 - RNA, 21 nt, synthetic construct
  source 1..21: mol_type = other RNA
gtgtttctagagagatatatc

SEQ ID NO: 19422 - RNA, 21 nt, synthetic construct
  source 1..21: mol_type = other RNA
gttaagttttggaagcttaaa

SEQ ID NO: 19423 - RNA, 21 nt, synthetic construct
  source 1..21: mol_type = other RNA
gttactggctttatgactttt

SEQ ID NO: 19424 - RNA, 21 nt, synthetic construct
  source 1..21: mol_type = other RNA
gttagtgctactaaatataca

SEQ ID NO: 19425 - RNA, 21 nt, synthetic construct
  source 1..21: mol_type = other RNA
gttatttaagcttccaaaact

SEQ ID NO: 19426 - RNA, 21 nt, synthetic construct
  source 1..21: mol_type = other RNA
gttccaggcaggatgaatctg

SEQ ID NO: 19427 - RNA, 21 nt, synthetic construct
  source 1..21: mol_type = other RNA
gttctgtcccatttgccatag

SEQ ID NO: 19428 - RNA, 21 nt, synthetic construct
  source 1..21: mol_type = other RNA
gttcttattattagaagctca

SEQ ID NO: 19429 - RNA, 21 nt, synthetic construct
  source 1..21: mol_type = other RNA
gttgagcccaaattcaaaccc

SEQ ID NO: 19430 - RNA, 21 nt, synthetic construct
  source 1..21: mol_type = other RNA
gttgagttggacccgataaaa

SEQ ID NO: 19431 - RNA, 21 nt, synthetic construct
  source 1..21: mol_type = other RNA
gttggacccgataaaatacaa

SEQ ID NO: 19432 - RNA, 21 nt, synthetic construct
  source 1..21: mol_type = other RNA
gttgggaatatattgcctaat

SEQ ID NO: 19433 - RNA, 21 nt, synthetic construct
  source 1..21: mol_type = other RNA
gttgtattttatcgggtccaa

SEQ ID NO: 19434 - RNA, 21 nt, synthetic construct
  source 1..21: mol_type = other RNA
gtttacagcaatcacctgtgg

SEQ ID NO: 19435 - RNA, 21 nt, synthetic construct
  source 1..21: mol_type = other RNA
gtttcagaaacagtactttcc

SEQ ID NO: 19436 - RNA, 21 nt, synthetic construct
  source 1..21: mol_type = other RNA
gtttctagagagatatatctg

SEQ ID NO: 19437 - RNA, 21 nt, synthetic construct
  source 1..21: mol_type = other RNA
gtttctgaaacattaggcaat

SEQ ID NO: 19438 - RNA, 21 nt, synthetic construct
  source 1..21: mol_type = other RNA
gtttctttgttttttagctca

SEQ ID NO: 19439 - RNA, 21 nt, synthetic construct
  source 1..21: mol_type = other RNA
gtttgaatttgggctcaacca

SEQ ID NO: 19440 - RNA, 21 nt, synthetic construct
  source 1..21: mol_type = other RNA
gtttgagggaaggcggcaaga

SEQ ID NO: 19441 - RNA, 21 nt, synthetic construct
  source 1..21: mol_type = other RNA
gttttaattagcatccacagg

SEQ ID NO: 19442 - RNA, 21 nt, synthetic construct
  source 1..21: mol_type = other RNA
gttttactgtgggcataaatt

SEQ ID NO: 19443 - RNA, 21 nt, synthetic construct
  source 1..21: mol_type = other RNA
gttttggaagcttaaataact

SEQ ID NO: 19444 - RNA, 21 nt, synthetic construct
  source 1..21: mol_type = other RNA
gtttttgttttactgtgggca

SEQ ID NO: 19445 - RNA, 21 nt, synthetic construct
  source 1..21: mol_type = other RNA
taaaacaaaaacaaaacccac

SEQ ID NO: 19446 - RNA, 21 nt, synthetic construct
  source 1..21: mol_type = other RNA
taaaacgcaaatcccactgtc

SEQ ID NO: 19447 - RNA, 21 nt, synthetic construct
  source 1..21: mol_type = other RNA
taaaagctaagagagctcttt

SEQ ID NO: 19448 - RNA, 21 nt, synthetic construct
  source 1..21: mol_type = other RNA
taaaaggcagctactcctcct

SEQ ID NO: 19449 - RNA, 21 nt, synthetic construct
  source 1..21: mol_type = other RNA
taaaatacaacagggataggt

SEQ ID NO: 19450 - RNA, 21 nt, synthetic construct
  source 1..21: mol_type = other RNA
taaactagccaggttgggaat

SEQ ID NO: 19451 - RNA, 21 nt, synthetic construct
  source 1..21: mol_type = other RNA
taaagccagtaactggttgag

SEQ ID NO: 19452 - RNA, 21 nt, synthetic construct
  source 1..21: mol_type = other RNA
taaataactctccaaaagtca

SEQ ID NO: 19453 - RNA, 21 nt, synthetic construct
  source 1..21: mol_type = other RNA
taaatacacttatattcaggg

SEQ ID NO: 19454 - RNA, 21 nt, synthetic construct
  source 1..21: mol_type = other RNA
taaatgcatacaagagctggc

SEQ ID NO: 19455 - RNA, 21 nt, synthetic construct
  source 1..21: mol_type = other RNA
taaatgcctcagggatcagag

SEQ ID NO: 19456 - RNA, 21 nt, synthetic construct
  source 1..21: mol_type = other RNA
taaatggttgagttggacccg

SEQ ID NO: 19457 - RNA, 21 nt, synthetic construct
  source 1..21: mol_type = other RNA
taacacttctcttcattttca

SEQ ID NO: 19458 - RNA, 21 nt, synthetic construct
  source 1..21: mol_type = other RNA
taacattaaaagctaagagag

SEQ ID NO: 19459 - RNA, 21 nt, synthetic construct
  source 1..21: mol_type = other RNA
taactctccaaaagtcataaa

SEQ ID NO: 19460 - RNA, 21 nt, synthetic construct
  source 1..21: mol_type = other RNA
taactggttgagcccaaattc

SEQ ID NO: 19461 - RNA, 21 nt, synthetic construct
  source 1..21: mol_type = other RNA
taagaacatattaaatgcctc

SEQ ID NO: 19462 - RNA, 21 nt, synthetic construct
  source 1..21: mol_type = other RNA
taagaagaggacaagtatcag

SEQ ID NO: 19463 - RNA, 21 nt, synthetic construct
  source 1..21: mol_type = other RNA
taagagagctctttgcatctg

SEQ ID NO: 19464 - RNA, 21 nt, synthetic construct
  source 1..21: mol_type = other RNA
taagcttccaaaacttaactg

SEQ ID NO: 19465 - RNA, 21 nt, synthetic construct
  source 1..21: mol_type = other RNA
taaggaaaggctactagcccc

SEQ ID NO: 19466 - RNA, 21 nt, synthetic construct
  source 1..21: mol_type = other RNA
taaggtatttgccagctcttg

SEQ ID NO: 19467 - RNA, 21 nt, synthetic construct
  source 1..21: mol_type = other RNA
taatattttcttcccacttcc

SEQ ID NO: 19468 - RNA, 21 nt, synthetic construct
  source 1..21: mol_type = other RNA
taatcttttctaagaagagga

SEQ ID NO: 19469 - RNA, 21 nt, synthetic construct
  source 1..21: mol_type = other RNA
taatgatagggtgtttctaga

SEQ ID NO: 19470 - RNA, 21 nt, synthetic construct
  source 1..21: mol_type = other RNA
taatgcatgtgacagtgggat

SEQ ID NO: 19471 - RNA, 21 nt, synthetic construct
  source 1..21: mol_type = other RNA
taatggaaagtatgttctgtc

SEQ ID NO: 19472 - RNA, 21 nt, synthetic construct
  source 1..21: mol_type = other RNA
taatgtttcagaaacagtact

SEQ ID NO: 19473 - RNA, 21 nt, synthetic construct
  source 1..21: mol_type = other RNA
taattaaaacgcaaatcccac

SEQ ID NO: 19474 - RNA, 21 nt, synthetic construct
  source 1..21: mol_type = other RNA
taattagcatccacaggtgat

SEQ ID NO: 19475 - RNA, 21 nt, synthetic construct
  source 1..21: mol_type = other RNA
taatttatgcccacagtaaaa

SEQ ID NO: 19476 - RNA, 21 nt, synthetic construct
  source 1..21: mol_type = other RNA
tacaaagtcagagaggggtct

SEQ ID NO: 19477 - RNA, 21 nt, synthetic construct
  source 1..21: mol_type = other RNA
tacaacagggataggtgagga

SEQ ID NO: 19478 - RNA, 21 nt, synthetic construct
  source 1..21: mol_type = other RNA
tacaagagctggcaaatacct

SEQ ID NO: 19479 - RNA, 21 nt, synthetic construct
  source 1..21: mol_type = other RNA
tacacttatattcagggtaca

SEQ ID NO: 19480 - RNA, 21 nt, synthetic construct
  source 1..21: mol_type = other RNA
tacagcaatcacctgtggatg

SEQ ID NO: 19481 - RNA, 21 nt, synthetic construct
  source 1..21: mol_type = other RNA
tacagtgatgctctcacaaaa

SEQ ID NO: 19482 - RNA, 21 nt, synthetic construct
  source 1..21: mol_type = other RNA
tacatgatcactaaaaggcag

SEQ ID NO: 19483 - RNA, 21 nt, synthetic construct
  source 1..21: mol_type = other RNA
taccaggccaccttgaccaga

SEQ ID NO: 19484 - RNA, 21 nt, synthetic construct
  source 1..21: mol_type = other RNA
taccctgaatataagtgtatt

SEQ ID NO: 19485 - RNA, 21 nt, synthetic construct
  source 1..21: mol_type = other RNA
tacctaatttcatgagctaaa

SEQ ID NO: 19486 - RNA, 21 nt, synthetic construct
  source 1..21: mol_type = other RNA
taccttaaatggttgagttgg

SEQ ID NO: 19487 - RNA, 21 nt, synthetic construct
  source 1..21: mol_type = other RNA
tactagccccatcaagaggtg

SEQ ID NO: 19488 - RNA, 21 nt, synthetic construct
  source 1..21: mol_type = other RNA
tactccatttgatcataatgg

SEQ ID NO: 19489 - RNA, 21 nt, synthetic construct
  source 1..21: mol_type = other RNA
tactcctccttctccccacag

SEQ ID NO: 19490 - RNA, 21 nt, synthetic construct
  source 1..21: mol_type = other RNA
tactcctccttgtctgggagg

SEQ ID NO: 19491 - RNA, 21 nt, synthetic construct
  source 1..21: mol_type = other RNA
tactggctttatgacttttgg

SEQ ID NO: 19492 - RNA, 21 nt, synthetic construct
  source 1..21: mol_type = other RNA
tactgtgggcataaattaatt

SEQ ID NO: 19493 - RNA, 21 nt, synthetic construct
  source 1..21: mol_type = other RNA
tactgtttctgaaacattagg

SEQ ID NO: 19494 - RNA, 21 nt, synthetic construct
  source 1..21: mol_type = other RNA
tacttgtcctcttcttagaaa

SEQ ID NO: 19495 - RNA, 21 nt, synthetic construct
  source 1..21: mol_type = other RNA
tactttccaaaatgagaggca

SEQ ID NO: 19496 - RNA, 21 nt, synthetic construct
  source 1..21: mol_type = other RNA
tagaaaagattacagtgatgc

SEQ ID NO: 19497 - RNA, 21 nt, synthetic construct
  source 1..21: mol_type = other RNA
tagaaacaccctatcattaag

SEQ ID NO: 19498 - RNA, 21 nt, synthetic construct
  source 1..21: mol_type = other RNA
tagaagctcagatgcaaagag

SEQ ID NO: 19499 - RNA, 21 nt, synthetic construct
  source 1..21: mol_type = other RNA
tagaccatccatggggaagtg

SEQ ID NO: 19500 - RNA, 21 nt, synthetic construct
  source 1..21: mol_type = other RNA
tagagagatatatctggtcaa

SEQ ID NO: 19501 - RNA, 21 nt, synthetic construct
  source 1..21: mol_type = other RNA
tagattccccaatccacctct

SEQ ID NO: 19502 - RNA, 21 nt, synthetic construct
  source 1..21: mol_type = other RNA
tagcactaacacttctcttca

SEQ ID NO: 19503 - RNA, 21 nt, synthetic construct
  source 1..21: mol_type = other RNA
tagcatccacaggtgattgct

SEQ ID NO: 19504 - RNA, 21 nt, synthetic construct
  source 1..21: mol_type = other RNA
tagccaggttgggaatatatt

SEQ ID NO: 19505 - RNA, 21 nt, synthetic construct
  source 1..21: mol_type = other RNA
tagccccatcaagaggtggat

SEQ ID NO: 19506 - RNA, 21 nt, synthetic construct
  source 1..21: mol_type = other RNA
tagcctttccttaatgatagg

SEQ ID NO: 19507 - RNA, 21 nt, synthetic construct
  source 1..21: mol_type = other RNA
tagctcatgaaattaggtaca

SEQ ID NO: 19508 - RNA, 21 nt, synthetic construct
  source 1..21: mol_type = other RNA
tagctgccttttagtgatcat

SEQ ID NO: 19509 - RNA, 21 nt, synthetic construct
  source 1..21: mol_type = other RNA
taggcaatatattcccaacct

SEQ ID NO: 19510 - RNA, 21 nt, synthetic construct
  source 1..21: mol_type = other RNA
tagggtgtttctagagagata

SEQ ID NO: 19511 - RNA, 21 nt, synthetic construct
  source 1..21: mol_type = other RNA
taggtacaaagtcagagaggg

SEQ ID NO: 19512 - RNA, 21 nt, synthetic construct
  source 1..21: mol_type = other RNA
taggtgaggactatggcaaat

SEQ ID NO: 19513 - RNA, 21 nt, synthetic construct
  source 1..21: mol_type = other RNA
tagtagcactaacacttctct

SEQ ID NO: 19514 - RNA, 21 nt, synthetic construct
  source 1..21: mol_type = other RNA
tagtagcctttccttaatgat

SEQ ID NO: 19515 - RNA, 21 nt, synthetic construct
  source 1..21: mol_type = other RNA
tagtcatgcctctcattttgg

SEQ ID NO: 19516 - RNA, 21 nt, synthetic construct
  source 1..21: mol_type = other RNA
tagtcctcacctatccctgtt

SEQ ID NO: 19517 - RNA, 21 nt, synthetic construct
  source 1..21: mol_type = other RNA
tagtgatcatgtaccctgaat

SEQ ID NO: 19518 - RNA, 21 nt, synthetic construct
  source 1..21: mol_type = other RNA
tagtgctactaaatatacaga

SEQ ID NO: 19519 - RNA, 21 nt, synthetic construct
  source 1..21: mol_type = other RNA
tagtttacagcaatcacctgt

SEQ ID NO: 19520 - RNA, 21 nt, synthetic construct
  source 1..21: mol_type = other RNA
tatatctctctagaaacaccc

SEQ ID NO: 19521 - RNA, 21 nt, synthetic construct
  source 1..21: mol_type = other RNA
tatatctggtcaaggtggcct

SEQ ID NO: 19522 - RNA, 21 nt, synthetic construct
  source 1..21: mol_type = other RNA
tatatgccagacccctctctg

SEQ ID NO: 19523 - RNA, 21 nt, synthetic construct
  source 1..21: mol_type = other RNA
tatattcagggtacatgatca

SEQ ID NO: 19524 - RNA, 21 nt, synthetic construct
  source 1..21: mol_type = other RNA
tatattcccaacctggctagt

SEQ ID NO: 19525 - RNA, 21 nt, synthetic construct
  source 1..21: mol_type = other RNA
tatattgcctaatgtttcaga

SEQ ID NO: 19526 - RNA, 21 nt, synthetic construct
  source 1..21: mol_type = other RNA
tatatttagtagcactaacac

SEQ ID NO: 19527 - RNA, 21 nt, synthetic construct
  source 1..21: mol_type = other RNA
tatcagacaggctgggtttga

SEQ ID NO: 19528 - RNA, 21 nt, synthetic construct
  source 1..21: mol_type = other RNA
tatcattaaggaaaggctact

SEQ ID NO: 19529 - RNA, 21 nt, synthetic construct
  source 1..21: mol_type = other RNA
tatccctgttgtattttatcg

SEQ ID NO: 19530 - RNA, 21 nt, synthetic construct
  source 1..21: mol_type = other RNA
tatcgggtccaactcaaccat

SEQ ID NO: 19531 - RNA, 21 nt, synthetic construct
  source 1..21: mol_type = other RNA
tatctctctagaaacacccta

SEQ ID NO: 19532 - RNA, 21 nt, synthetic construct
  source 1..21: mol_type = other RNA
tatctggtcaaggtggcctgg

SEQ ID NO: 19533 - RNA, 21 nt, synthetic construct
  source 1..21: mol_type = other RNA
tatgacttttggagagttatt

SEQ ID NO: 19534 - RNA, 21 nt, synthetic construct
  source 1..21: mol_type = other RNA
tatgatcaaatggagtaatgc

SEQ ID NO: 19535 - RNA, 21 nt, synthetic construct
  source 1..21: mol_type = other RNA
tatgcatttaggttttgtttc

SEQ ID NO: 19536 - RNA, 21 nt, synthetic construct
  source 1..21: mol_type = other RNA
tatgccagacccctctctgac

SEQ ID NO: 19537 - RNA, 21 nt, synthetic construct
  source 1..21: mol_type = other RNA
tatgcccacagtaaaacaaaa

SEQ ID NO: 19538 - RNA, 21 nt, synthetic construct
  source 1..21: mol_type = other RNA
tatggcaaatgggacagaaca

SEQ ID NO: 19539 - RNA, 21 nt, synthetic construct
  source 1..21: mol_type = other RNA
tatgttctgtcccatttgcca

SEQ ID NO: 19540 - RNA, 21 nt, synthetic construct
  source 1..21: mol_type = other RNA
tattaaatgcctcagggatca

SEQ ID NO: 19541 - RNA, 21 nt, synthetic construct
  source 1..21: mol_type = other RNA
tattagaagctcagatgcaaa

SEQ ID NO: 19542 - RNA, 21 nt, synthetic construct
  source 1..21: mol_type = other RNA
tattattagaagctcagatgc

SEQ ID NO: 19543 - RNA, 21 nt, synthetic construct
  source 1..21: mol_type = other RNA
tattcagggtacatgatcact

SEQ ID NO: 19544 - RNA, 21 nt, synthetic construct
  source 1..21: mol_type = other RNA
tattcccaacctggctagttt

SEQ ID NO: 19545 - RNA, 21 nt, synthetic construct
  source 1..21: mol_type = other RNA
tattgcctaatgtttcagaaa

SEQ ID NO: 19546 - RNA, 21 nt, synthetic construct
  source 1..21: mol_type = other RNA
tatttagtagcactaacactt

SEQ ID NO: 19547 - RNA, 21 nt, synthetic construct
  source 1..21: mol_type = other RNA
tatttgccagctcttgtatgc

SEQ ID NO: 19548 - RNA, 21 nt, synthetic construct
  source 1..21: mol_type = other RNA
tattttatcgggtccaactca

SEQ ID NO: 19549 - RNA, 21 nt, synthetic construct
  source 1..21: mol_type = other RNA
tattttcttcccacttcccca

SEQ ID NO: 19550 - RNA, 21 nt, synthetic construct
  source 1..21: mol_type = other RNA
tcaaacagagagttccaggca

SEQ ID NO: 19551 - RNA, 21 nt, synthetic construct
  source 1..21: mol_type = other RNA
tcaaacccagcctgtctgata

SEQ ID NO: 19552 - RNA, 21 nt, synthetic construct
  source 1..21: mol_type = other RNA
tcaaatggagtaatgcatgtg

SEQ ID NO: 19553 - RNA, 21 nt, synthetic construct
  source 1..21: mol_type = other RNA
tcaaccagttactggctttat

SEQ ID NO: 19554 - RNA, 21 nt, synthetic construct
  source 1..21: mol_type = other RNA
tcaaccatttaaggtatttgc

SEQ ID NO: 19555 - RNA, 21 nt, synthetic construct
  source 1..21: mol_type = other RNA
tcaagaggtggattggggaat

SEQ ID NO: 19556 - RNA, 21 nt, synthetic construct
  source 1..21: mol_type = other RNA
tcaaggtggcctggtactcct

SEQ ID NO: 19557 - RNA, 21 nt, synthetic construct
  source 1..21: mol_type = other RNA
tcaatctgtatatttagtagc

SEQ ID NO: 19558 - RNA, 21 nt, synthetic construct
  source 1..21: mol_type = other RNA
tcacaaaatcttgccgccttc

SEQ ID NO: 19559 - RNA, 21 nt, synthetic construct
  source 1..21: mol_type = other RNA
tcacatgcattactccatttg

SEQ ID NO: 19560 - RNA, 21 nt, synthetic construct
  source 1..21: mol_type = other RNA
tcacctatccctgttgtattt

SEQ ID NO: 19561 - RNA, 21 nt, synthetic construct
  source 1..21: mol_type = other RNA
tcacctgtggatgctaattaa

SEQ ID NO: 19562 - RNA, 21 nt, synthetic construct
  source 1..21: mol_type = other RNA
tcactaaaaggcagctactcc

SEQ ID NO: 19563 - RNA, 21 nt, synthetic construct
  source 1..21: mol_type = other RNA
tcactgtaatcttttctaaga

SEQ ID NO: 19564 - RNA, 21 nt, synthetic construct
  source 1..21: mol_type = other RNA
tcagaaacagtactttccaaa

SEQ ID NO: 19565 - RNA, 21 nt, synthetic construct
  source 1..21: mol_type = other RNA
tcagacaggctgggtttgaat

SEQ ID NO: 19566 - RNA, 21 nt, synthetic construct
  source 1..21: mol_type = other RNA
tcagagcacagattcatcctg

SEQ ID NO: 19567 - RNA, 21 nt, synthetic construct
  source 1..21: mol_type = other RNA
tcagatgcaaagagctctctt

SEQ ID NO: 19568 - RNA, 21 nt, synthetic construct
  source 1..21: mol_type = other RNA
tcagggatcagagcacagatt

SEQ ID NO: 19569 - RNA, 21 nt, synthetic construct
  source 1..21: mol_type = other RNA
tcagggtacatgatcactaaa

SEQ ID NO: 19570 - RNA, 21 nt, synthetic construct
  source 1..21: mol_type = other RNA
tcaggtcttcattagattccc

SEQ ID NO: 19571 - RNA, 21 nt, synthetic construct
  source 1..21: mol_type = other RNA
tcagttaagttttggaagctt

SEQ ID NO: 19572 - RNA, 21 nt, synthetic construct
  source 1..21: mol_type = other RNA
tcataaagccagtaactggtt

SEQ ID NO: 19573 - RNA, 21 nt, synthetic construct
  source 1..21: mol_type = other RNA
tcataatggaaagtatgttct

SEQ ID NO: 19574 - RNA, 21 nt, synthetic construct
  source 1..21: mol_type = other RNA
tcatcctgcctggaactctct

SEQ ID NO: 19575 - RNA, 21 nt, synthetic construct
  source 1..21: mol_type = other RNA
tcatgaaattaggtacaaagt

SEQ ID NO: 19576 - RNA, 21 nt, synthetic construct
  source 1..21: mol_type = other RNA
tcatgagctaaaaaacaaaga

SEQ ID NO: 19577 - RNA, 21 nt, synthetic construct
  source 1..21: mol_type = other RNA
tcatgcctctcattttggaaa

SEQ ID NO: 19578 - RNA, 21 nt, synthetic construct
  source 1..21: mol_type = other RNA
tcatgtaccctgaatataagt

SEQ ID NO: 19579 - RNA, 21 nt, synthetic construct
  source 1..21: mol_type = other RNA
tcattaaggaaaggctactag

SEQ ID NO: 19580 - RNA, 21 nt, synthetic construct
  source 1..21: mol_type = other RNA
tcattagattccccaatccac

SEQ ID NO: 19581 - RNA, 21 nt, synthetic construct
  source 1..21: mol_type = other RNA
tcattgaaaatgaagagaagt

SEQ ID NO: 19582 - RNA, 21 nt, synthetic construct
  source 1..21: mol_type = other RNA
tcattttggaaagtactgttt

SEQ ID NO: 19583 - RNA, 21 nt, synthetic construct
  source 1..21: mol_type = other RNA
tccaaaagtcataaagccagt

SEQ ID NO: 19584 - RNA, 21 nt, synthetic construct
  source 1..21: mol_type = other RNA
tccaaaatgagaggcatgact

SEQ ID NO: 19585 - RNA, 21 nt, synthetic construct
  source 1..21: mol_type = other RNA
tccaactcaaccatttaaggt

SEQ ID NO: 19586 - RNA, 21 nt, synthetic construct
  source 1..21: mol_type = other RNA
tccacaggtgattgctgtaaa

SEQ ID NO: 19587 - RNA, 21 nt, synthetic construct
  source 1..21: mol_type = other RNA
tccacctcttgatggggctag

SEQ ID NO: 19588 - RNA, 21 nt, synthetic construct
  source 1..21: mol_type = other RNA
tccaggcaggatgaatctgtg

SEQ ID NO: 19589 - RNA, 21 nt, synthetic construct
  source 1..21: mol_type = other RNA
tccatggggaagtgggaagaa

SEQ ID NO: 19590 - RNA, 21 nt, synthetic construct
  source 1..21: mol_type = other RNA
tccattatgatcaaatggagt

SEQ ID NO: 19591 - RNA, 21 nt, synthetic construct
  source 1..21: mol_type = other RNA
tccatttgatcataatggaaa

SEQ ID NO: 19592 - RNA, 21 nt, synthetic construct
  source 1..21: mol_type = other RNA
tcccaacctggctagtttaca

SEQ ID NO: 19593 - RNA, 21 nt, synthetic construct
  source 1..21: mol_type = other RNA
tcccactgtcacatgcattac

SEQ ID NO: 19594 - RNA, 21 nt, synthetic construct
  source 1..21: mol_type = other RNA
tcccacttccccatggatggt

SEQ ID NO: 19595 - RNA, 21 nt, synthetic construct
  source 1..21: mol_type = other RNA
tcccagacaaggaggagtagc

SEQ ID NO: 19596 - RNA, 21 nt, synthetic construct
  source 1..21: mol_type = other RNA
tcccatttgccatagtcctca

SEQ ID NO: 19597 - RNA, 21 nt, synthetic construct
  source 1..21: mol_type = other RNA
tccccaatccacctcttgatg

SEQ ID NO: 19598 - RNA, 21 nt, synthetic construct
  source 1..21: mol_type = other RNA
tccccacagcctcccagacaa

SEQ ID NO: 19599 - RNA, 21 nt, synthetic construct
  source 1..21: mol_type = other RNA
tccccatggatggtctagtca

SEQ ID NO: 19600 - RNA, 21 nt, synthetic construct
  source 1..21: mol_type = other RNA
tccctcaaacagagagttcca

SEQ ID NO: 19601 - RNA, 21 nt, synthetic construct
  source 1..21: mol_type = other RNA
tccctgaggcatttaatatgt

SEQ ID NO: 19602 - RNA, 21 nt, synthetic construct
  source 1..21: mol_type = other RNA
tccctgttgtattttatcggg

SEQ ID NO: 19603 - RNA, 21 nt, synthetic construct
  source 1..21: mol_type = other RNA
tcctcacctatccctgttgta

SEQ ID NO: 19604 - RNA, 21 nt, synthetic construct
  source 1..21: mol_type = other RNA
tcctccttctccccacagcct

SEQ ID NO: 19605 - RNA, 21 nt, synthetic construct
  source 1..21: mol_type = other RNA
tcctccttgtctgggaggctg

SEQ ID NO: 19606 - RNA, 21 nt, synthetic construct
  source 1..21: mol_type = other RNA
tcctcttcttagaaaagatta

SEQ ID NO: 19607 - RNA, 21 nt, synthetic construct
  source 1..21: mol_type = other RNA
tcctgcctggaactctctgtt

SEQ ID NO: 19608 - RNA, 21 nt, synthetic construct
  source 1..21: mol_type = other RNA
tccttaatgatagggtgtttc

SEQ ID NO: 19609 - RNA, 21 nt, synthetic construct
  source 1..21: mol_type = other RNA
tccttctccccacagcctccc

SEQ ID NO: 19610 - RNA, 21 nt, synthetic construct
  source 1..21: mol_type = other RNA
tccttgtctgggaggctgtgg

SEQ ID NO: 19611 - RNA, 21 nt, synthetic construct
  source 1..21: mol_type = other RNA
tcgggtccaactcaaccattt

SEQ ID NO: 19612 - RNA, 21 nt, synthetic construct
  source 1..21: mol_type = other RNA
tctaagaagaggacaagtatc

SEQ ID NO: 19613 - RNA, 21 nt, synthetic construct
  source 1..21: mol_type = other RNA
tctaatgaagacctgattttt

SEQ ID NO: 19614 - RNA, 21 nt, synthetic construct
  source 1..21: mol_type = other RNA
tctagaaacaccctatcatta

SEQ ID NO: 19615 - RNA, 21 nt, synthetic construct
  source 1..21: mol_type = other RNA
tctagagagatatatctggtc

SEQ ID NO: 19616 - RNA, 21 nt, synthetic construct
  source 1..21: mol_type = other RNA
tctagtcatgcctctcatttt

SEQ ID NO: 19617 - RNA, 21 nt, synthetic construct
  source 1..21: mol_type = other RNA
tctcacaaaatcttgccgcct

SEQ ID NO: 19618 - RNA, 21 nt, synthetic construct
  source 1..21: mol_type = other RNA
tctcattttggaaagtactgt

SEQ ID NO: 19619 - RNA, 21 nt, synthetic construct
  source 1..21: mol_type = other RNA
tctccaaaagtcataaagcca

SEQ ID NO: 19620 - RNA, 21 nt, synthetic construct
  source 1..21: mol_type = other RNA
tctccccacagcctcccagac

SEQ ID NO: 19621 - RNA, 21 nt, synthetic construct
  source 1..21: mol_type = other RNA
tctctagaaacaccctatcat

SEQ ID NO: 19622 - RNA, 21 nt, synthetic construct
  source 1..21: mol_type = other RNA
tctctctagaaacaccctatc

SEQ ID NO: 19623 - RNA, 21 nt, synthetic construct
  source 1..21: mol_type = other RNA
tctctgactttgtacctaatt

SEQ ID NO: 19624 - RNA, 21 nt, synthetic construct
  source 1..21: mol_type = other RNA
tctctgtttgagggaaggcgg

SEQ ID NO: 19625 - RNA, 21 nt, synthetic construct
  source 1..21: mol_type = other RNA
tctgaaacattaggcaatata

SEQ ID NO: 19626 - RNA, 21 nt, synthetic construct
  source 1..21: mol_type = other RNA
tctgacctgtgtgtgggtttt

SEQ ID NO: 19627 - RNA, 21 nt, synthetic construct
  source 1..21: mol_type = other RNA
tctgactttgtacctaatttc

SEQ ID NO: 19628 - RNA, 21 nt, synthetic construct
  source 1..21: mol_type = other RNA
tctgagcttctaataataaga

SEQ ID NO: 19629 - RNA, 21 nt, synthetic construct
  source 1..21: mol_type = other RNA
tctgatacttgtcctcttctt

SEQ ID NO: 19630 - RNA, 21 nt, synthetic construct
  source 1..21: mol_type = other RNA
tctgatccctgaggcatttaa

SEQ ID NO: 19631 - RNA, 21 nt, synthetic construct
  source 1..21: mol_type = other RNA
tctgggaggctgtggggagaa

SEQ ID NO: 19632 - RNA, 21 nt, synthetic construct
  source 1..21: mol_type = other RNA
tctggtcaaggtggcctggta

SEQ ID NO: 19633 - RNA, 21 nt, synthetic construct
  source 1..21: mol_type = other RNA
tctgtatatttagtagcacta

SEQ ID NO: 19634 - RNA, 21 nt, synthetic construct
  source 1..21: mol_type = other RNA
tctgtcccatttgccatagtc

SEQ ID NO: 19635 - RNA, 21 nt, synthetic construct
  source 1..21: mol_type = other RNA
tctgtgctctgatccctgagg

SEQ ID NO: 19636 - RNA, 21 nt, synthetic construct
  source 1..21: mol_type = other RNA
tctgtttgagggaaggcggca

SEQ ID NO: 19637 - RNA, 21 nt, synthetic construct
  source 1..21: mol_type = other RNA
tcttagaaaagattacagtga

SEQ ID NO: 19638 - RNA, 21 nt, synthetic construct
  source 1..21: mol_type = other RNA
tcttattattagaagctcaga

SEQ ID NO: 19639 - RNA, 21 nt, synthetic construct
  source 1..21: mol_type = other RNA
tcttcattagattccccaatc

SEQ ID NO: 19640 - RNA, 21 nt, synthetic construct
  source 1..21: mol_type = other RNA
tcttcccacttccccatggat

SEQ ID NO: 19641 - RNA, 21 nt, synthetic construct
  source 1..21: mol_type = other RNA
tcttcttagaaaagattacag

SEQ ID NO: 19642 - RNA, 21 nt, synthetic construct
  source 1..21: mol_type = other RNA
tcttgatggggctagtagcct

SEQ ID NO: 19643 - RNA, 21 nt, synthetic construct
  source 1..21: mol_type = other RNA
tcttgccgccttccctcaaac

SEQ ID NO: 19644 - RNA, 21 nt, synthetic construct
  source 1..21: mol_type = other RNA
tcttgtatgcatttaggtttt

SEQ ID NO: 19645 - RNA, 21 nt, synthetic construct
  source 1..21: mol_type = other RNA
tctttgcatctgagcttctaa

SEQ ID NO: 19646 - RNA, 21 nt, synthetic construct
  source 1..21: mol_type = other RNA
tctttgttttttagctcatga

SEQ ID NO: 19647 - RNA, 21 nt, synthetic construct
  source 1..21: mol_type = other RNA
tcttttctaagaagaggacaa

SEQ ID NO: 19648 - RNA, 21 nt, synthetic construct
  source 1..21: mol_type = other RNA
tgaaaatgaagagaagtgtta

SEQ ID NO: 19649 - RNA, 21 nt, synthetic construct
  source 1..21: mol_type = other RNA
tgaaattaggtacaaagtcag

SEQ ID NO: 19650 - RNA, 21 nt, synthetic construct
  source 1..21: mol_type = other RNA
tgaagagaagtgttagtgcta

SEQ ID NO: 19651 - RNA, 21 nt, synthetic construct
  source 1..21: mol_type = other RNA
tgaatctgtgctctgatccct

SEQ ID NO: 19652 - RNA, 21 nt, synthetic construct
  source 1..21: mol_type = other RNA
tgaatttgggctcaaccagtt

SEQ ID NO: 19653 - RNA, 21 nt, synthetic construct
  source 1..21: mol_type = other RNA
tgacagtgggatttgcgtttt

SEQ ID NO: 19654 - RNA, 21 nt, synthetic construct
  source 1..21: mol_type = other RNA
tgaccagatatatctctctag

SEQ ID NO: 19655 - RNA, 21 nt, synthetic construct
  source 1..21: mol_type = other RNA
tgacctgtgtgtgggttttgt

SEQ ID NO: 19656 - RNA, 21 nt, synthetic construct
  source 1..21: mol_type = other RNA
tgactagaccatccatgggga

SEQ ID NO: 19657 - RNA, 21 nt, synthetic construct
  source 1..21: mol_type = other RNA
tgactttgtacctaatttcat

SEQ ID NO: 19658 - RNA, 21 nt, synthetic construct
  source 1..21: mol_type = other RNA
tgacttttggagagttattta

SEQ ID NO: 19659 - RNA, 21 nt, synthetic construct
  source 1..21: mol_type = other RNA
tgagagcatcactgtaatctt

SEQ ID NO: 19660 - RNA, 21 nt, synthetic construct
  source 1..21: mol_type = other RNA
tgagaggcatgactagaccat

SEQ ID NO: 19661 - RNA, 21 nt, synthetic construct
  source 1..21: mol_type = other RNA
tgagcccaaattcaaacccag

SEQ ID NO: 19662 - RNA, 21 nt, synthetic construct
  source 1..21: mol_type = other RNA
tgagctaaaaaacaaagaaac

SEQ ID NO: 19663 - RNA, 21 nt, synthetic construct
  source 1..21: mol_type = other RNA
tgagcttctaataataagaac

SEQ ID NO: 19664 - RNA, 21 nt, synthetic construct
  source 1..21: mol_type = other RNA
tgaggactatggcaaatggga

SEQ ID NO: 19665 - RNA, 21 nt, synthetic construct
  source 1..21: mol_type = other RNA
tgaggcatttaatatgttctt

SEQ ID NO: 19666 - RNA, 21 nt, synthetic construct
  source 1..21: mol_type = other RNA
tgagggaaggcggcaagattt

SEQ ID NO: 19667 - RNA, 21 nt, synthetic construct
  source 1..21: mol_type = other RNA
tgagttggacccgataaaata

SEQ ID NO: 19668 - RNA, 21 nt, synthetic construct
  source 1..21: mol_type = other RNA
tgatacttgtcctcttcttag

SEQ ID NO: 19669 - RNA, 21 nt, synthetic construct
  source 1..21: mol_type = other RNA
tgatagggtgtttctagagag

SEQ ID NO: 19670 - RNA, 21 nt, synthetic construct
  source 1..21: mol_type = other RNA
tgatcaaatggagtaatgcat

SEQ ID NO: 19671 - RNA, 21 nt, synthetic construct
  source 1..21: mol_type = other RNA
tgatcactaaaaggcagctac

SEQ ID NO: 19672 - RNA, 21 nt, synthetic construct
  source 1..21: mol_type = other RNA
tgatcataatggaaagtatgt

SEQ ID NO: 19673 - RNA, 21 nt, synthetic construct
  source 1..21: mol_type = other RNA
tgatcatgtaccctgaatata

SEQ ID NO: 19674 - RNA, 21 nt, synthetic construct
  source 1..21: mol_type = other RNA
tgatccctgaggcatttaata

SEQ ID NO: 19675 - RNA, 21 nt, synthetic construct
  source 1..21: mol_type = other RNA
tgatgctctcacaaaatcttg

SEQ ID NO: 19676 - RNA, 21 nt, synthetic construct
  source 1..21: mol_type = other RNA
tgatggggctagtagcctttc

SEQ ID NO: 19677 - RNA, 21 nt, synthetic construct
  source 1..21: mol_type = other RNA
tgattgctgtaaactagccag

SEQ ID NO: 19678 - RNA, 21 nt, synthetic construct
  source 1..21: mol_type = other RNA
tgcaaagagctctcttagctt

SEQ ID NO: 19679 - RNA, 21 nt, synthetic construct
  source 1..21: mol_type = other RNA
tgcatacaagagctggcaaat

SEQ ID NO: 19680 - RNA, 21 nt, synthetic construct
  source 1..21: mol_type = other RNA
tgcatctgagcttctaataat

SEQ ID NO: 19681 - RNA, 21 nt, synthetic construct
  source 1..21: mol_type = other RNA
tgcatgtgacagtgggatttg

SEQ ID NO: 19682 - RNA, 21 nt, synthetic construct
  source 1..21: mol_type = other RNA
tgcattactccatttgatcat

SEQ ID NO: 19683 - RNA, 21 nt, synthetic construct
  source 1..21: mol_type = other RNA
tgcatttaggttttgtttctt

SEQ ID NO: 19684 - RNA, 21 nt, synthetic construct
  source 1..21: mol_type = other RNA
tgccagacccctctctgactt

SEQ ID NO: 19685 - RNA, 21 nt, synthetic construct
  source 1..21: mol_type = other RNA
tgccagctcttgtatgcattt

SEQ ID NO: 19686 - RNA, 21 nt, synthetic construct
  source 1..21: mol_type = other RNA
tgccatagtcctcacctatcc

SEQ ID NO: 19687 - RNA, 21 nt, synthetic construct
  source 1..21: mol_type = other RNA
tgcccacagtaaaacaaaaac

SEQ ID NO: 19688 - RNA, 21 nt, synthetic construct
  source 1..21: mol_type = other RNA
tgccgccttccctcaaacaga

SEQ ID NO: 19689 - RNA, 21 nt, synthetic construct
  source 1..21: mol_type = other RNA
tgcctaatgtttcagaaacag

SEQ ID NO: 19690 - RNA, 21 nt, synthetic construct
  source 1..21: mol_type = other RNA
tgcctcagggatcagagcaca

SEQ ID NO: 19691 - RNA, 21 nt, synthetic construct
  source 1..21: mol_type = other RNA
tgcctctcattttggaaagta

SEQ ID NO: 19692 - RNA, 21 nt, synthetic construct
  source 1..21: mol_type = other RNA
tgcctggaactctctgtttga

SEQ ID NO: 19693 - RNA, 21 nt, synthetic construct
  source 1..21: mol_type = other RNA
tgccttttagtgatcatgtac

SEQ ID NO: 19694 - RNA, 21 nt, synthetic construct
  source 1..21: mol_type = other RNA
tgcgttttaattagcatccac

SEQ ID NO: 19695 - RNA, 21 nt, synthetic construct
  source 1..21: mol_type = other RNA
tgctaattaaaacgcaaatcc

SEQ ID NO: 19696 - RNA, 21 nt, synthetic construct
  source 1..21: mol_type = other RNA
tgctactaaatatacagattg

SEQ ID NO: 19697 - RNA, 21 nt, synthetic construct
  source 1..21: mol_type = other RNA
tgctctcacaaaatcttgccg

SEQ ID NO: 19698 - RNA, 21 nt, synthetic construct
  source 1..21: mol_type = other RNA
tgctctgatccctgaggcatt

SEQ ID NO: 19699 - RNA, 21 nt, synthetic construct
  source 1..21: mol_type = other RNA
tgctgtaaactagccaggttg

SEQ ID NO: 19700 - RNA, 21 nt, synthetic construct
  source 1..21: mol_type = other RNA
tggaaagtactgtttctgaaa

SEQ ID NO: 19701 - RNA, 21 nt, synthetic construct
  source 1..21: mol_type = other RNA
tggaaagtatgttctgtccca

SEQ ID NO: 19702 - RNA, 21 nt, synthetic construct
  source 1..21: mol_type = other RNA
tggaactctctgtttgaggga

SEQ ID NO: 19703 - RNA, 21 nt, synthetic construct
  source 1..21: mol_type = other RNA
tggaagcttaaataactctcc

SEQ ID NO: 19704 - RNA, 21 nt, synthetic construct
  source 1..21: mol_type = other RNA
tggacccgataaaatacaaca

SEQ ID NO: 19705 - RNA, 21 nt, synthetic construct
  source 1..21: mol_type = other RNA
tggagagttatttaagcttcc

SEQ ID NO: 19706 - RNA, 21 nt, synthetic construct
  source 1..21: mol_type = other RNA
tggagtaatgcatgtgacagt

SEQ ID NO: 19707 - RNA, 21 nt, synthetic construct
  source 1..21: mol_type = other RNA
tggatgctaattaaaacgcaa

SEQ ID NO: 19708 - RNA, 21 nt, synthetic construct
  source 1..21: mol_type = other RNA
tggatggtctagtcatgcctc

SEQ ID NO: 19709 - RNA, 21 nt, synthetic construct
  source 1..21: mol_type = other RNA
tggattggggaatctaatgaa

SEQ ID NO: 19710 - RNA, 21 nt, synthetic construct
  source 1..21: mol_type = other RNA
tggcaaataccttaaatggtt

SEQ ID NO: 19711 - RNA, 21 nt, synthetic construct
  source 1..21: mol_type = other RNA
tggcaaatgggacagaacata

SEQ ID NO: 19712 - RNA, 21 nt, synthetic construct
  source 1..21: mol_type = other RNA
tggcctggtactcctccttct

SEQ ID NO: 19713 - RNA, 21 nt, synthetic construct
  source 1..21: mol_type = other RNA
tggctagtttacagcaatcac

SEQ ID NO: 19714 - RNA, 21 nt, synthetic construct
  source 1..21: mol_type = other RNA
tggctttatgacttttggaga

SEQ ID NO: 19715 - RNA, 21 nt, synthetic construct
  source 1..21: mol_type = other RNA
tgggaatatattgcctaatgt

SEQ ID NO: 19716 - RNA, 21 nt, synthetic construct
  source 1..21: mol_type = other RNA
tgggacagaacatactttcca

SEQ ID NO: 19717 - RNA, 21 nt, synthetic construct
  source 1..21: mol_type = other RNA
tgggaggctgtggggagaagg

SEQ ID NO: 19718 - RNA, 21 nt, synthetic construct
  source 1..21: mol_type = other RNA
tgggatttgcgttttaattag

SEQ ID NO: 19719 - RNA, 21 nt, synthetic construct
  source 1..21: mol_type = other RNA
tgggctcaaccagttactggc

SEQ ID NO: 19720 - RNA, 21 nt, synthetic construct
  source 1..21: mol_type = other RNA
tggggaagtgggaagaaaata

SEQ ID NO: 19721 - RNA, 21 nt, synthetic construct
  source 1..21: mol_type = other RNA
tggggaatctaatgaagacct

SEQ ID NO: 19722 - RNA, 21 nt, synthetic construct
  source 1..21: mol_type = other RNA
tggggagaaggaggagtacca

SEQ ID NO: 19723 - RNA, 21 nt, synthetic construct
  source 1..21: mol_type = other RNA
tggggctagtagcctttcctt

SEQ ID NO: 19724 - RNA, 21 nt, synthetic construct
  source 1..21: mol_type = other RNA
tgggtttgaatttgggctcaa

SEQ ID NO: 19725 - RNA, 21 nt, synthetic construct
  source 1..21: mol_type = other RNA
tgggttttgtttttgttttac

SEQ ID NO: 19726 - RNA, 21 nt, synthetic construct
  source 1..21: mol_type = other RNA
tggtactcctccttctcccca

SEQ ID NO: 19727 - RNA, 21 nt, synthetic construct
  source 1..21: mol_type = other RNA
tggtcaaggtggcctggtact

SEQ ID NO: 19728 - RNA, 21 nt, synthetic construct
  source 1..21: mol_type = other RNA
tggtctagtcatgcctctcat

SEQ ID NO: 19729 - RNA, 21 nt, synthetic construct
  source 1..21: mol_type = other RNA
tggttgagcccaaattcaaac

SEQ ID NO: 19730 - RNA, 21 nt, synthetic construct
  source 1..21: mol_type = other RNA
tggttgagttggacccgataa

SEQ ID NO: 19731 - RNA, 21 nt, synthetic construct
  source 1..21: mol_type = other RNA
tgtaaactagccaggttggga

SEQ ID NO: 19732 - RNA, 21 nt, synthetic construct
  source 1..21: mol_type = other RNA
tgtaatcttttctaagaagag

SEQ ID NO: 19733 - RNA, 21 nt, synthetic construct
  source 1..21: mol_type = other RNA
tgtaccctgaatataagtgta

SEQ ID NO: 19734 - RNA, 21 nt, synthetic construct
  source 1..21: mol_type = other RNA
tgtacctaatttcatgagcta

SEQ ID NO: 19735 - RNA, 21 nt, synthetic construct
  source 1..21: mol_type = other RNA
tgtatatttagtagcactaac

SEQ ID NO: 19736 - RNA, 21 nt, synthetic construct
  source 1..21: mol_type = other RNA
tgtatgcatttaggttttgtt

SEQ ID NO: 19737 - RNA, 21 nt, synthetic construct
  source 1..21: mol_type = other RNA
tgtattttatcgggtccaact

SEQ ID NO: 19738 - RNA, 21 nt, synthetic construct
  source 1..21: mol_type = other RNA
tgtcacatgcattactccatt

SEQ ID NO: 19739 - RNA, 21 nt, synthetic construct
  source 1..21: mol_type = other RNA
tgtcccatttgccatagtcct

SEQ ID NO: 19740 - RNA, 21 nt, synthetic construct
  source 1..21: mol_type = other RNA
tgtcctcttcttagaaaagat

SEQ ID NO: 19741 - RNA, 21 nt, synthetic construct
  source 1..21: mol_type = other RNA
tgtctgatacttgtcctcttc

SEQ ID NO: 19742 - RNA, 21 nt, synthetic construct
  source 1..21: mol_type = other RNA
tgtctgggaggctgtggggag

SEQ ID NO: 19743 - RNA, 21 nt, synthetic construct
  source 1..21: mol_type = other RNA
tgtgacagtgggatttgcgtt

SEQ ID NO: 19744 - RNA, 21 nt, synthetic construct
  source 1..21: mol_type = other RNA
tgtgagagcatcactgtaatc

SEQ ID NO: 19745 - RNA, 21 nt, synthetic construct
  source 1..21: mol_type = other RNA
tgtgctctgatccctgaggca

SEQ ID NO: 19746 - RNA, 21 nt, synthetic construct
  source 1..21: mol_type = other RNA
tgtggatgctaattaaaacgc

SEQ ID NO: 19747 - RNA, 21 nt, synthetic construct
  source 1..21: mol_type = other RNA
tgtggggagaaggaggagtac

SEQ ID NO: 19748 - RNA, 21 nt, synthetic construct
  source 1..21: mol_type = other RNA
tgtgggttttgtttttgtttt

SEQ ID NO: 19749 - RNA, 21 nt, synthetic construct
  source 1..21: mol_type = other RNA
tgtgtgggttttgtttttgtt

SEQ ID NO: 19750 - RNA, 21 nt, synthetic construct
  source 1..21: mol_type = other RNA
tgtgtgtgggttttgtttttg

SEQ ID NO: 19751 - RNA, 21 nt, synthetic construct
  source 1..21: mol_type = other RNA
tgttagtgctactaaatatac

SEQ ID NO: 19752 - RNA, 21 nt, synthetic construct
  source 1..21: mol_type = other RNA
tgttctgtcccatttgccata

SEQ ID NO: 19753 - RNA, 21 nt, synthetic construct
  source 1..21: mol_type = other RNA
tgttcttattattagaagctc

SEQ ID NO: 19754 - RNA, 21 nt, synthetic construct
  source 1..21: mol_type = other RNA
tgttgtattttatcgggtcca

SEQ ID NO: 19755 - RNA, 21 nt, synthetic construct
  source 1..21: mol_type = other RNA
tgtttcagaaacagtactttc

SEQ ID NO: 19756 - RNA, 21 nt, synthetic construct
  source 1..21: mol_type = other RNA
tgtttctagagagatatatct

SEQ ID NO: 19757 - RNA, 21 nt, synthetic construct
  source 1..21: mol_type = other RNA
tgtttctgaaacattaggcaa

SEQ ID NO: 19758 - RNA, 21 nt, synthetic construct
  source 1..21: mol_type = other RNA
tgtttctttgttttttagctc

SEQ ID NO: 19759 - RNA, 21 nt, synthetic construct
  source 1..21: mol_type = other RNA
tgtttgagggaaggcggcaag

SEQ ID NO: 19760 - RNA, 21 nt, synthetic construct
  source 1..21: mol_type = other RNA
tgttttactgtgggcataaat

SEQ ID NO: 19761 - RNA, 21 nt, synthetic construct
  source 1..21: mol_type = other RNA
tgtttttgttttactgtgggc

SEQ ID NO: 19762 - RNA, 21 nt, synthetic construct
  source 1..21: mol_type = other RNA
ttaaaacgcaaatcccactgt

SEQ ID NO: 19763 - RNA, 21 nt, synthetic construct
  source 1..21: mol_type = other RNA
ttaaaagctaagagagctctt

SEQ ID NO: 19764 - RNA, 21 nt, synthetic construct
  source 1..21: mol_type = other RNA
ttaaataactctccaaaagtc

SEQ ID NO: 19765 - RNA, 21 nt, synthetic construct
  source 1..21: mol_type = other RNA
ttaaatgcctcagggatcaga

SEQ ID NO: 19766 - RNA, 21 nt, synthetic construct
  source 1..21: mol_type = other RNA
ttaaatggttgagttggaccc

SEQ ID NO: 19767 - RNA, 21 nt, synthetic construct
  source 1..21: mol_type = other RNA
ttaagcttccaaaacttaact

SEQ ID NO: 19768 - RNA, 21 nt, synthetic construct
  source 1..21: mol_type = other RNA
ttaaggaaaggctactagccc

SEQ ID NO: 19769 - RNA, 21 nt, synthetic construct
  source 1..21: mol_type = other RNA
ttaaggtatttgccagctctt

SEQ ID NO: 19770 - RNA, 21 nt, synthetic construct
  source 1..21: mol_type = other RNA
ttaatgatagggtgtttctag

SEQ ID NO: 19771 - RNA, 21 nt, synthetic construct
  source 1..21: mol_type = other RNA
ttaattagcatccacaggtga

SEQ ID NO: 19772 - RNA, 21 nt, synthetic construct
  source 1..21: mol_type = other RNA
ttaatttatgcccacagtaaa

SEQ ID NO: 19773 - RNA, 21 nt, synthetic construct
  source 1..21: mol_type = other RNA
ttacagcaatcacctgtggat

SEQ ID NO: 19774 - RNA, 21 nt, synthetic construct
  source 1..21: mol_type = other RNA
ttacagtgatgctctcacaaa

SEQ ID NO: 19775 - RNA, 21 nt, synthetic construct
  source 1..21: mol_type = other RNA
ttactccatttgatcataatg

SEQ ID NO: 19776 - RNA, 21 nt, synthetic construct
  source 1..21: mol_type = other RNA
ttactggctttatgacttttg

SEQ ID NO: 19777 - RNA, 21 nt, synthetic construct
  source 1..21: mol_type = other RNA
ttactgtgggcataaattaat

SEQ ID NO: 19778 - RNA, 21 nt, synthetic construct
  source 1..21: mol_type = other RNA
ttagaaaagattacagtgatg

SEQ ID NO: 19779 - RNA, 21 nt, synthetic construct
  source 1..21: mol_type = other RNA
ttagaagctcagatgcaaaga

SEQ ID NO: 19780 - RNA, 21 nt, synthetic construct
  source 1..21: mol_type = other RNA
ttagattccccaatccacctc

SEQ ID NO: 19781 - RNA, 21 nt, synthetic construct
  source 1..21: mol_type = other RNA
ttagcatccacaggtgattgc

SEQ ID NO: 19782 - RNA, 21 nt, synthetic construct
  source 1..21: mol_type = other RNA
ttagctcatgaaattaggtac

SEQ ID NO: 19783 - RNA, 21 nt, synthetic construct
  source 1..21: mol_type = other RNA
ttaggcaatatattcccaacc

SEQ ID NO: 19784 - RNA, 21 nt, synthetic construct
  source 1..21: mol_type = other RNA
ttaggtacaaagtcagagagg

SEQ ID NO: 19785 - RNA, 21 nt, synthetic construct
  source 1..21: mol_type = other RNA
ttagtagcactaacacttctc

SEQ ID NO: 19786 - RNA, 21 nt, synthetic construct
  source 1..21: mol_type = other RNA
ttagtgatcatgtaccctgaa

SEQ ID NO: 19787 - RNA, 21 nt, synthetic construct
  source 1..21: mol_type = other RNA
ttagtgctactaaatatacag

SEQ ID NO: 19788 - RNA, 21 nt, synthetic construct
  source 1..21: mol_type = other RNA
ttatatgccagacccctctct

SEQ ID NO: 19789 - RNA, 21 nt, synthetic construct
  source 1..21: mol_type = other RNA
ttatattcagggtacatgatc

SEQ ID NO: 19790 - RNA, 21 nt, synthetic construct
  source 1..21: mol_type = other RNA
ttatcgggtccaactcaacca

SEQ ID NO: 19791 - RNA, 21 nt, synthetic construct
  source 1..21: mol_type = other RNA
ttatgacttttggagagttat

SEQ ID NO: 19792 - RNA, 21 nt, synthetic construct
  source 1..21: mol_type = other RNA
ttatgatcaaatggagtaatg

SEQ ID NO: 19793 - RNA, 21 nt, synthetic construct
  source 1..21: mol_type = other RNA
ttatgcccacagtaaaacaaa

SEQ ID NO: 19794 - RNA, 21 nt, synthetic construct
  source 1..21: mol_type = other RNA
ttattagaagctcagatgcaa

SEQ ID NO: 19795 - RNA, 21 nt, synthetic construct
  source 1..21: mol_type = other RNA
ttattattagaagctcagatg

SEQ ID NO: 19796 - RNA, 21 nt, synthetic construct
  source 1..21: mol_type = other RNA
ttcaaacccagcctgtctgat

SEQ ID NO: 19797 - RNA, 21 nt, synthetic construct
  source 1..21: mol_type = other RNA
ttcagaaacagtactttccaa

SEQ ID NO: 19798 - RNA, 21 nt, synthetic construct
  source 1..21: mol_type = other RNA
ttcagggtacatgatcactaa

SEQ ID NO: 19799 - RNA, 21 nt, synthetic construct
  source 1..21: mol_type = other RNA
ttcagttaagttttggaagct

SEQ ID NO: 19800 - RNA, 21 nt, synthetic construct
  source 1..21: mol_type = other RNA
ttcatcctgcctggaactctc

SEQ ID NO: 19801 - RNA, 21 nt, synthetic construct
  source 1..21: mol_type = other RNA
ttcatgagctaaaaaacaaag

SEQ ID NO: 19802 - RNA, 21 nt, synthetic construct
  source 1..21: mol_type = other RNA
ttcattagattccccaatcca

SEQ ID NO: 19803 - RNA, 21 nt, synthetic construct
  source 1..21: mol_type = other RNA
ttcattgaaaatgaagagaag

SEQ ID NO: 19804 - RNA, 21 nt, synthetic construct
  source 1..21: mol_type = other RNA
ttccaaaatgagaggcatgac

SEQ ID NO: 19805 - RNA, 21 nt, synthetic construct
  source 1..21: mol_type = other RNA
ttccaggcaggatgaatctgt

SEQ ID NO: 19806 - RNA, 21 nt, synthetic construct
  source 1..21: mol_type = other RNA
ttccattatgatcaaatggag

SEQ ID NO: 19807 - RNA, 21 nt, synthetic construct
  source 1..21: mol_type = other RNA
ttcccaacctggctagtttac

SEQ ID NO: 19808 - RNA, 21 nt, synthetic construct
  source 1..21: mol_type = other RNA
ttcccacttccccatggatgg

SEQ ID NO: 19809 - RNA, 21 nt, synthetic construct
  source 1..21: mol_type = other RNA
ttccccaatccacctcttgat

SEQ ID NO: 19810 - RNA, 21 nt, synthetic construct
  source 1..21: mol_type = other RNA
ttccccatggatggtctagtc

SEQ ID NO: 19811 - RNA, 21 nt, synthetic construct
  source 1..21: mol_type = other RNA
ttccctcaaacagagagttcc

SEQ ID NO: 19812 - RNA, 21 nt, synthetic construct
  source 1..21: mol_type = other RNA
ttccttaatgatagggtgttt

SEQ ID NO: 19813 - RNA, 21 nt, synthetic construct
  source 1..21: mol_type = other RNA
ttctaagaagaggacaagtat

SEQ ID NO: 19814 - RNA, 21 nt, synthetic construct
  source 1..21: mol_type = other RNA
ttctagagagatatatctggt

SEQ ID NO: 19815 - RNA, 21 nt, synthetic construct
  source 1..21: mol_type = other RNA
ttctccccacagcctcccaga

SEQ ID NO: 19816 - RNA, 21 nt, synthetic construct
  source 1..21: mol_type = other RNA
ttctgaaacattaggcaatat

SEQ ID NO: 19817 - RNA, 21 nt, synthetic construct
  source 1..21: mol_type = other RNA
ttctgtcccatttgccatagt

SEQ ID NO: 19818 - RNA, 21 nt, synthetic construct
  source 1..21: mol_type = other RNA
ttcttagaaaagattacagtg

SEQ ID NO: 19819 - RNA, 21 nt, synthetic construct
  source 1..21: mol_type = other RNA
ttcttattattagaagctcag

SEQ ID NO: 19820 - RNA, 21 nt, synthetic construct
  source 1..21: mol_type = other RNA
ttcttcccacttccccatgga

SEQ ID NO: 19821 - RNA, 21 nt, synthetic construct
  source 1..21: mol_type = other RNA
ttctttgttttttagctcatg

SEQ ID NO: 19822 - RNA, 21 nt, synthetic construct
  source 1..21: mol_type = other RNA
ttgaaaatgaagagaagtgtt

SEQ ID NO: 19823 - RNA, 21 nt, synthetic construct
  source 1..21: mol_type = other RNA
ttgaatttgggctcaaccagt

SEQ ID NO: 19824 - RNA, 21 nt, synthetic construct
  source 1..21: mol_type = other RNA
ttgaccagatatatctctcta

SEQ ID NO: 19825 - RNA, 21 nt, synthetic construct
  source 1..21: mol_type = other RNA
ttgagcccaaattcaaaccca

SEQ ID NO: 19826 - RNA, 21 nt, synthetic construct
  source 1..21: mol_type = other RNA
ttgagggaaggcggcaagatt

SEQ ID NO: 19827 - RNA, 21 nt, synthetic construct
  source 1..21: mol_type = other RNA
ttgagttggacccgataaaat

SEQ ID NO: 19828 - RNA, 21 nt, synthetic construct
  source 1..21: mol_type = other RNA
ttgatcataatggaaagtatg

SEQ ID NO: 19829 - RNA, 21 nt, synthetic construct
  source 1..21: mol_type = other RNA
ttgatggggctagtagccttt

SEQ ID NO: 19830 - RNA, 21 nt, synthetic construct
  source 1..21: mol_type = other RNA
ttgcatctgagcttctaataa

SEQ ID NO: 19831 - RNA, 21 nt, synthetic construct
  source 1..21: mol_type = other RNA
ttgccagctcttgtatgcatt

SEQ ID NO: 19832 - RNA, 21 nt, synthetic construct
  source 1..21: mol_type = other RNA
ttgccatagtcctcacctatc

SEQ ID NO: 19833 - RNA, 21 nt, synthetic construct
  source 1..21: mol_type = other RNA
ttgccgccttccctcaaacag

SEQ ID NO: 19834 - RNA, 21 nt, synthetic construct
  source 1..21: mol_type = other RNA
ttgcctaatgtttcagaaaca

SEQ ID NO: 19835 - RNA, 21 nt, synthetic construct
  source 1..21: mol_type = other RNA
ttgcgttttaattagcatcca

SEQ ID NO: 19836 - RNA, 21 nt, synthetic construct
  source 1..21: mol_type = other RNA
ttgctgtaaactagccaggtt

SEQ ID NO: 19837 - RNA, 21 nt, synthetic construct
  source 1..21: mol_type = other RNA
ttggaaagtactgtttctgaa

SEQ ID NO: 19838 - RNA, 21 nt, synthetic construct
  source 1..21: mol_type = other RNA
ttggaagcttaaataactctc

SEQ ID NO: 19839 - RNA, 21 nt, synthetic construct
  source 1..21: mol_type = other RNA
ttggacccgataaaatacaac

SEQ ID NO: 19840 - RNA, 21 nt, synthetic construct
  source 1..21: mol_type = other RNA
ttggagagttatttaagcttc

SEQ ID NO: 19841 - RNA, 21 nt, synthetic construct
  source 1..21: mol_type = other RNA
ttgggaatatattgcctaatg

SEQ ID NO: 19842 - RNA, 21 nt, synthetic construct
  source 1..21: mol_type = other RNA
ttgggctcaaccagttactgg

SEQ ID NO: 19843 - RNA, 21 nt, synthetic construct
  source 1..21: mol_type = other RNA
ttggggaatctaatgaagacc

SEQ ID NO: 19844 - RNA, 21 nt, synthetic construct
  source 1..21: mol_type = other RNA
ttgtacctaatttcatgagct

SEQ ID NO: 19845 - RNA, 21 nt, synthetic construct
  source 1..21: mol_type = other RNA
ttgtatgcatttaggttttgt

SEQ ID NO: 19846 - RNA, 21 nt, synthetic construct
  source 1..21: mol_type = other RNA
ttgtattttatcgggtccaac

SEQ ID NO: 19847 - RNA, 21 nt, synthetic construct
  source 1..21: mol_type = other RNA
ttgtcctcttcttagaaaaga

SEQ ID NO: 19848 - RNA, 21 nt, synthetic construct
  source 1..21: mol_type = other RNA
ttgtctgggaggctgtgggga

SEQ ID NO: 19849 - RNA, 21 nt, synthetic construct
  source 1..21: mol_type = other RNA
ttgtgagagcatcactgtaat

SEQ ID NO: 19850 - RNA, 21 nt, synthetic construct
  source 1..21: mol_type = other RNA
ttgttttactgtgggcataaa

SEQ ID NO: 19851 - RNA, 21 nt, synthetic construct
  source 1..21: mol_type = other RNA
ttgtttttgttttactgtggg

SEQ ID NO: 19852 - RNA, 21 nt, synthetic construct
  source 1..21: mol_type = other RNA
tttaagcttccaaaacttaac

SEQ ID NO: 19853 - RNA, 21 nt, synthetic construct
  source 1..21: mol_type = other RNA
tttaaggtatttgccagctct

SEQ ID NO: 19854 - RNA, 21 nt, synthetic construct
  source 1..21: mol_type = other RNA
tttaattagcatccacaggtg

SEQ ID NO: 19855 - RNA, 21 nt, synthetic construct
  source 1..21: mol_type = other RNA
tttacagcaatcacctgtgga

SEQ ID NO: 19856 - RNA, 21 nt, synthetic construct
  source 1..21: mol_type = other RNA
tttactgtgggcataaattaa

SEQ ID NO: 19857 - RNA, 21 nt, synthetic construct
  source 1..21: mol_type = other RNA
tttagctcatgaaattaggta

SEQ ID NO: 19858 - RNA, 21 nt, synthetic construct
  source 1..21: mol_type = other RNA
tttagtagcactaacacttct

SEQ ID NO: 19859 - RNA, 21 nt, synthetic construct
  source 1..21: mol_type = other RNA
tttagtgatcatgtaccctga

SEQ ID NO: 19860 - RNA, 21 nt, synthetic construct
  source 1..21: mol_type = other RNA
tttatatgccagacccctctc

SEQ ID NO: 19861 - RNA, 21 nt, synthetic construct
  source 1..21: mol_type = other RNA
tttatcgggtccaactcaacc

SEQ ID NO: 19862 - RNA, 21 nt, synthetic construct
  source 1..21: mol_type = other RNA
tttatgacttttggagagtta

SEQ ID NO: 19863 - RNA, 21 nt, synthetic construct
  source 1..21: mol_type = other RNA
tttatgcccacagtaaaacaa

SEQ ID NO: 19864 - RNA, 21 nt, synthetic construct
  source 1..21: mol_type = other RNA
tttcagaaacagtactttcca

SEQ ID NO: 19865 - RNA, 21 nt, synthetic construct
  source 1..21: mol_type = other RNA
tttcagttaagttttggaagc

SEQ ID NO: 19866 - RNA, 21 nt, synthetic construct
  source 1..21: mol_type = other RNA
tttccaaaatgagaggcatga

SEQ ID NO: 19867 - RNA, 21 nt, synthetic construct
  source 1..21: mol_type = other RNA
tttccattatgatcaaatgga

SEQ ID NO: 19868 - RNA, 21 nt, synthetic construct
  source 1..21: mol_type = other RNA
tttccttaatgatagggtgtt

SEQ ID NO: 19869 - RNA, 21 nt, synthetic construct
  source 1..21: mol_type = other RNA
tttctaagaagaggacaagta

SEQ ID NO: 19870 - RNA, 21 nt, synthetic construct
  source 1..21: mol_type = other RNA
tttctagagagatatatctgg

SEQ ID NO: 19871 - RNA, 21 nt, synthetic construct
  source 1..21: mol_type = other RNA
tttctgaaacattaggcaata

SEQ ID NO: 19872 - RNA, 21 nt, synthetic construct
  source 1..21: mol_type = other RNA
tttcttcccacttccccatgg

SEQ ID NO: 19873 - RNA, 21 nt, synthetic construct
  source 1..21: mol_type = other RNA
tttgaatttgggctcaaccag

SEQ ID NO: 19874 - RNA, 21 nt, synthetic construct
  source 1..21: mol_type = other RNA
tttgagggaaggcggcaagat

SEQ ID NO: 19875 - RNA, 21 nt, synthetic construct
  source 1..21: mol_type = other RNA
tttgcatctgagcttctaata

SEQ ID NO: 19876 - RNA, 21 nt, synthetic construct
  source 1..21: mol_type = other RNA
tttgccagctcttgtatgcat

SEQ ID NO: 19877 - RNA, 21 nt, synthetic construct
  source 1..21: mol_type = other RNA
tttgccatagtcctcacctat

SEQ ID NO: 19878 - RNA, 21 nt, synthetic construct
  source 1..21: mol_type = other RNA
tttgcgttttaattagcatcc

SEQ ID NO: 19879 - RNA, 21 nt, synthetic construct
  source 1..21: mol_type = other RNA
tttggaaagtactgtttctga

SEQ ID NO: 19880 - RNA, 21 nt, synthetic construct
  source 1..21: mol_type = other RNA
tttggaagcttaaataactct

SEQ ID NO: 19881 - RNA, 21 nt, synthetic construct
  source 1..21: mol_type = other RNA
tttggagagttatttaagctt

SEQ ID NO: 19882 - RNA, 21 nt, synthetic construct
  source 1..21: mol_type = other RNA
tttgggctcaaccagttactg

SEQ ID NO: 19883 - RNA, 21 nt, synthetic construct
  source 1..21: mol_type = other RNA
tttgtacctaatttcatgagc

SEQ ID NO: 19884 - RNA, 21 nt, synthetic construct
  source 1..21: mol_type = other RNA
tttgtgagagcatcactgtaa

SEQ ID NO: 19885 - RNA, 21 nt, synthetic construct
  source 1..21: mol_type = other RNA
tttgttttactgtgggcataa

SEQ ID NO: 19886 - RNA, 21 nt, synthetic construct
  source 1..21: mol_type = other RNA
tttgtttttgttttactgtgg

SEQ ID NO: 19887 - RNA, 21 nt, synthetic construct
  source 1..21: mol_type = other RNA
ttttaattagcatccacaggt

SEQ ID NO: 19888 - RNA, 21 nt, synthetic construct
  source 1..21: mol_type = other RNA
ttttactgtgggcataaatta

SEQ ID NO: 19889 - RNA, 21 nt, synthetic construct
  source 1..21: mol_type = other RNA
ttttagctcatgaaattaggt

SEQ ID NO: 19890 - RNA, 21 nt, synthetic construct
  source 1..21: mol_type = other RNA
ttttagtgatcatgtaccctg

SEQ ID NO: 19891 - RNA, 21 nt, synthetic construct
  source 1..21: mol_type = other RNA
ttttatcgggtccaactcaac

SEQ ID NO: 19892 - RNA, 21 nt, synthetic construct
  source 1..21: mol_type = other RNA
ttttcagttaagttttggaag

SEQ ID NO: 19893 - RNA, 21 nt, synthetic construct
  source 1..21: mol_type = other RNA
ttttctaagaagaggacaagt

SEQ ID NO: 19894 - RNA, 21 nt, synthetic construct
  source 1..21: mol_type = other RNA
ttttcttcccacttccccatg

SEQ ID NO: 19895 - RNA, 21 nt, synthetic construct
  source 1..21: mol_type = other RNA
ttttggaaagtactgtttctg

SEQ ID NO: 19896 - RNA, 21 nt, synthetic construct
  source 1..21: mol_type = other RNA
ttttggaagcttaaataactc

SEQ ID NO: 19897 - RNA, 21 nt, synthetic construct
  source 1..21: mol_type = other RNA
ttttggagagttatttaagct

SEQ ID NO: 19898 - RNA, 21 nt, synthetic construct
  source 1..21: mol_type = other RNA
ttttgtgagagcatcactgta

SEQ ID NO: 19899 - RNA, 21 nt, synthetic construct
  source 1..21: mol_type = other RNA
ttttgttttactgtgggcata

SEQ ID NO: 19900 - RNA, 21 nt, synthetic construct
  source 1..21: mol_type = other RNA
tttttagctcatgaaattagg

SEQ ID NO: 19901 - RNA, 21 nt, synthetic construct
  source 1..21: mol_type = other RNA
tttttgttttactgtgggcat

SEQ ID NO: 19902 - RNA, 22 nt, synthetic construct
  source 1..22: mol_type = other RNA
aaaaaatcaggtcttcattaga

SEQ ID NO: 19903 - RNA, 22 nt, synthetic construct
  source 1..22: mol_type = other RNA
aaaaatcaggtcttcattagat

SEQ ID NO: 19904 - RNA, 22 nt, synthetic construct
  source 1..22: mol_type = other RNA
aaaaattaatttatgcccacag

SEQ ID NO: 19905 - RNA, 22 nt, synthetic construct
  source 1..22: mol_type = other RNA
aaaacaaaaacaaaacccacac

SEQ ID NO: 19906 - RNA, 22 nt, synthetic construct
  source 1..22: mol_type = other RNA
aaaacctaaatgcatacaagag

SEQ ID NO: 19907 - RNA, 22 nt, synthetic construct
  source 1..22: mol_type = other RNA
aaaacgcaaatcccactgtcac

SEQ ID NO: 19908 - RNA, 22 nt, synthetic construct
  source 1..22: mol_type = other RNA
aaaagattacagtgatgctctc

SEQ ID NO: 19909 - RNA, 22 nt, synthetic construct
  source 1..22: mol_type = other RNA
aaaagctaagagagctctttgc

SEQ ID NO: 19910 - RNA, 22 nt, synthetic construct
  source 1..22: mol_type = other RNA
aaaaggcagctactcctccttg

SEQ ID NO: 19911 - RNA, 22 nt, synthetic construct
  source 1..22: mol_type = other RNA
aaaagtcataaagccagtaact

SEQ ID NO: 19912 - RNA, 22 nt, synthetic construct
  source 1..22: mol_type = other RNA
aaaatacaacagggataggtga

SEQ ID NO: 19913 - RNA, 22 nt, synthetic construct
  source 1..22: mol_type = other RNA
aaaatcaggtcttcattagatt

SEQ ID NO: 19914 - RNA, 22 nt, synthetic construct
  source 1..22: mol_type = other RNA
aaaatcttgccgccttccctca

SEQ ID NO: 19915 - RNA, 22 nt, synthetic construct
  source 1..22: mol_type = other RNA
aaaatgaagagaagtgttagtg

SEQ ID NO: 19916 - RNA, 22 nt, synthetic construct
  source 1..22: mol_type = other RNA
aaaatgagaggcatgactagac

SEQ ID NO: 19917 - RNA, 22 nt, synthetic construct
  source 1..22: mol_type = other RNA
aaaattaatttatgcccacagt

SEQ ID NO: 19918 - RNA, 22 nt, synthetic construct
  source 1..22: mol_type = other RNA
aaacaaaaacaaaacccacaca

SEQ ID NO: 19919 - RNA, 22 nt, synthetic construct
  source 1..22: mol_type = other RNA
aaacaaaacctaaatgcataca

SEQ ID NO: 19920 - RNA, 22 nt, synthetic construct
  source 1..22: mol_type = other RNA
aaacaccctatcattaaggaaa

SEQ ID NO: 19921 - RNA, 22 nt, synthetic construct
  source 1..22: mol_type = other RNA
aaacagagagttccaggcagga

SEQ ID NO: 19922 - RNA, 22 nt, synthetic construct
  source 1..22: mol_type = other RNA
aaacagtactttccaaaatgag

SEQ ID NO: 19923 - RNA, 22 nt, synthetic construct
  source 1..22: mol_type = other RNA
aaacattaggcaatatattccc

SEQ ID NO: 19924 - RNA, 22 nt, synthetic construct
  source 1..22: mol_type = other RNA
aaacccagcctgtctgatactt

SEQ ID NO: 19925 - RNA, 22 nt, synthetic construct
  source 1..22: mol_type = other RNA
aaacctaaatgcatacaagagc

SEQ ID NO: 19926 - RNA, 22 nt, synthetic construct
  source 1..22: mol_type = other RNA
aaacgcaaatcccactgtcaca

SEQ ID NO: 19927 - RNA, 22 nt, synthetic construct
  source 1..22: mol_type = other RNA
aaactagccaggttgggaatat

SEQ ID NO: 19928 - RNA, 22 nt, synthetic construct
  source 1..22: mol_type = other RNA
aaagaaacaaaacctaaatgca

SEQ ID NO: 19929 - RNA, 22 nt, synthetic construct
  source 1..22: mol_type = other RNA
aaagagctctcttagcttttaa

SEQ ID NO: 19930 - RNA, 22 nt, synthetic construct
  source 1..22: mol_type = other RNA
aaagattacagtgatgctctca

SEQ ID NO: 19931 - RNA, 22 nt, synthetic construct
  source 1..22: mol_type = other RNA
aaagccagtaactggttgagcc

SEQ ID NO: 19932 - RNA, 22 nt, synthetic construct
  source 1..22: mol_type = other RNA
aaagctaagagagctctttgca

SEQ ID NO: 19933 - RNA, 22 nt, synthetic construct
  source 1..22: mol_type = other RNA
aaaggcagctactcctccttgt

SEQ ID NO: 19934 - RNA, 22 nt, synthetic construct
  source 1..22: mol_type = other RNA
aaaggctactagccccatcaag

SEQ ID NO: 19935 - RNA, 22 nt, synthetic construct
  source 1..22: mol_type = other RNA
aaagtactgtttctgaaacatt

SEQ ID NO: 19936 - RNA, 22 nt, synthetic construct
  source 1..22: mol_type = other RNA
aaagtatgttctgtcccatttg

SEQ ID NO: 19937 - RNA, 22 nt, synthetic construct
  source 1..22: mol_type = other RNA
aaagtcataaagccagtaactg

SEQ ID NO: 19938 - RNA, 22 nt, synthetic construct
  source 1..22: mol_type = other RNA
aaataactctccaaaagtcata

SEQ ID NO: 19939 - RNA, 22 nt, synthetic construct
  source 1..22: mol_type = other RNA
aaatacaacagggataggtgag

SEQ ID NO: 19940 - RNA, 22 nt, synthetic construct
  source 1..22: mol_type = other RNA
aaatacacttatattcagggta

SEQ ID NO: 19941 - RNA, 22 nt, synthetic construct
  source 1..22: mol_type = other RNA
aaataccttaaatggttgagtt

SEQ ID NO: 19942 - RNA, 22 nt, synthetic construct
  source 1..22: mol_type = other RNA
aaatcaggtcttcattagattc

SEQ ID NO: 19943 - RNA, 22 nt, synthetic construct
  source 1..22: mol_type = other RNA
aaatcccactgtcacatgcatt

SEQ ID NO: 19944 - RNA, 22 nt, synthetic construct
  source 1..22: mol_type = other RNA
aaatcttgccgccttccctcaa

SEQ ID NO: 19945 - RNA, 22 nt, synthetic construct
  source 1..22: mol_type = other RNA
aaatgaagagaagtgttagtgc

SEQ ID NO: 19946 - RNA, 22 nt, synthetic construct
  source 1..22: mol_type = other RNA
aaatgagaggcatgactagacc

SEQ ID NO: 19947 - RNA, 22 nt, synthetic construct
  source 1..22: mol_type = other RNA
aaatgcatacaagagctggcaa

SEQ ID NO: 19948 - RNA, 22 nt, synthetic construct
  source 1..22: mol_type = other RNA
aaatgcctcagggatcagagca

SEQ ID NO: 19949 - RNA, 22 nt, synthetic construct
  source 1..22: mol_type = other RNA
aaatggagtaatgcatgtgaca

SEQ ID NO: 19950 - RNA, 22 nt, synthetic construct
  source 1..22: mol_type = other RNA
aaatgggacagaacatactttc

SEQ ID NO: 19951 - RNA, 22 nt, synthetic construct
  source 1..22: mol_type = other RNA
aaatggttgagttggacccgat

SEQ ID NO: 19952 - RNA, 22 nt, synthetic construct
  source 1..22: mol_type = other RNA
aaattaatttatgcccacagta

SEQ ID NO: 19953 - RNA, 22 nt, synthetic construct
  source 1..22: mol_type = other RNA
aaattaggtacaaagtcagaga

SEQ ID NO: 19954 - RNA, 22 nt, synthetic construct
  source 1..22: mol_type = other RNA
aaattcaaacccagcctgtctg

SEQ ID NO: 19955 - RNA, 22 nt, synthetic construct
  source 1..22: mol_type = other RNA
aacaaaaacaaaacccacacac

SEQ ID NO: 19956 - RNA, 22 nt, synthetic construct
  source 1..22: mol_type = other RNA
aacaaaacctaaatgcatacaa

SEQ ID NO: 19957 - RNA, 22 nt, synthetic construct
  source 1..22: mol_type = other RNA
aacaccctatcattaaggaaag

SEQ ID NO: 19958 - RNA, 22 nt, synthetic construct
  source 1..22: mol_type = other RNA
aacacttctcttcattttcaat

SEQ ID NO: 19959 - RNA, 22 nt, synthetic construct
  source 1..22: mol_type = other RNA
aacagagagttccaggcaggat

SEQ ID NO: 19960 - RNA, 22 nt, synthetic construct
  source 1..22: mol_type = other RNA
aacagggataggtgaggactat

SEQ ID NO: 19961 - RNA, 22 nt, synthetic construct
  source 1..22: mol_type = other RNA
aacagtactttccaaaatgaga

SEQ ID NO: 19962 - RNA, 22 nt, synthetic construct
  source 1..22: mol_type = other RNA
aacatactttccattatgatca

SEQ ID NO: 19963 - RNA, 22 nt, synthetic construct
  source 1..22: mol_type = other RNA
aacatattaaatgcctcaggga

SEQ ID NO: 19964 - RNA, 22 nt, synthetic construct
  source 1..22: mol_type = other RNA
aacattaaaagctaagagagct

SEQ ID NO: 19965 - RNA, 22 nt, synthetic construct
  source 1..22: mol_type = other RNA
aacattaggcaatatattccca

SEQ ID NO: 19966 - RNA, 22 nt, synthetic construct
  source 1..22: mol_type = other RNA
aaccagttactggctttatgac

SEQ ID NO: 19967 - RNA, 22 nt, synthetic construct
  source 1..22: mol_type = other RNA
aaccatttaaggtatttgccag

SEQ ID NO: 19968 - RNA, 22 nt, synthetic construct
  source 1..22: mol_type = other RNA
aacccagcctgtctgatacttg

SEQ ID NO: 19969 - RNA, 22 nt, synthetic construct
  source 1..22: mol_type = other RNA
aacctaaatgcatacaagagct

SEQ ID NO: 19970 - RNA, 22 nt, synthetic construct
  source 1..22: mol_type = other RNA
aacctggctagtttacagcaat

SEQ ID NO: 19971 - RNA, 22 nt, synthetic construct
  source 1..22: mol_type = other RNA
aacgcaaatcccactgtcacat

SEQ ID NO: 19972 - RNA, 22 nt, synthetic construct
  source 1..22: mol_type = other RNA
aactagccaggttgggaatata

SEQ ID NO: 19973 - RNA, 22 nt, synthetic construct
  source 1..22: mol_type = other RNA
aactcaaccatttaaggtattt

SEQ ID NO: 19974 - RNA, 22 nt, synthetic construct
  source 1..22: mol_type = other RNA
aactctccaaaagtcataaagc

SEQ ID NO: 19975 - RNA, 22 nt, synthetic construct
  source 1..22: mol_type = other RNA
aactctctgtttgagggaaggc

SEQ ID NO: 19976 - RNA, 22 nt, synthetic construct
  source 1..22: mol_type = other RNA
aactggttgagcccaaattcaa

SEQ ID NO: 19977 - RNA, 22 nt, synthetic construct
  source 1..22: mol_type = other RNA
aagaaacaaaacctaaatgcat

SEQ ID NO: 19978 - RNA, 22 nt, synthetic construct
  source 1..22: mol_type = other RNA
aagaacatattaaatgcctcag

SEQ ID NO: 19979 - RNA, 22 nt, synthetic construct
  source 1..22: mol_type = other RNA
aagaagaggacaagtatcagac

SEQ ID NO: 19980 - RNA, 22 nt, synthetic construct
  source 1..22: mol_type = other RNA
aagagaagtgttagtgctacta

SEQ ID NO: 19981 - RNA, 22 nt, synthetic construct
  source 1..22: mol_type = other RNA
aagagagctctttgcatctgag

SEQ ID NO: 19982 - RNA, 22 nt, synthetic construct
  source 1..22: mol_type = other RNA
aagagctctcttagcttttaat

SEQ ID NO: 19983 - RNA, 22 nt, synthetic construct
  source 1..22: mol_type = other RNA
aagagctggcaaataccttaaa

SEQ ID NO: 19984 - RNA, 22 nt, synthetic construct
  source 1..22: mol_type = other RNA
aagaggacaagtatcagacagg

SEQ ID NO: 19985 - RNA, 22 nt, synthetic construct
  source 1..22: mol_type = other RNA
aagaggtggattggggaatcta

SEQ ID NO: 19986 - RNA, 22 nt, synthetic construct
  source 1..22: mol_type = other RNA
aagattacagtgatgctctcac

SEQ ID NO: 19987 - RNA, 22 nt, synthetic construct
  source 1..22: mol_type = other RNA
aagattttgtgagagcatcact

SEQ ID NO: 19988 - RNA, 22 nt, synthetic construct
  source 1..22: mol_type = other RNA
aagccagtaactggttgagccc

SEQ ID NO: 19989 - RNA, 22 nt, synthetic construct
  source 1..22: mol_type = other RNA
aagctaagagagctctttgcat

SEQ ID NO: 19990 - RNA, 22 nt, synthetic construct
  source 1..22: mol_type = other RNA
aagctcagatgcaaagagctct

SEQ ID NO: 19991 - RNA, 22 nt, synthetic construct
  source 1..22: mol_type = other RNA
aagcttaaataactctccaaaa

SEQ ID NO: 19992 - RNA, 22 nt, synthetic construct
  source 1..22: mol_type = other RNA
aagcttccaaaacttaactgaa

SEQ ID NO: 19993 - RNA, 22 nt, synthetic construct
  source 1..22: mol_type = other RNA
aaggaaaggctactagccccat

SEQ ID NO: 19994 - RNA, 22 nt, synthetic construct
  source 1..22: mol_type = other RNA
aaggaggagtaccaggccacct

SEQ ID NO: 19995 - RNA, 22 nt, synthetic construct
  source 1..22: mol_type = other RNA
aaggaggagtagctgcctttta

SEQ ID NO: 19996 - RNA, 22 nt, synthetic construct
  source 1..22: mol_type = other RNA
aaggcagctactcctccttgtc

SEQ ID NO: 19997 - RNA, 22 nt, synthetic construct
  source 1..22: mol_type = other RNA
aaggcggcaagattttgtgaga

SEQ ID NO: 19998 - RNA, 22 nt, synthetic construct
  source 1..22: mol_type = other RNA
aaggctactagccccatcaaga

SEQ ID NO: 19999 - RNA, 22 nt, synthetic construct
  source 1..22: mol_type = other RNA
aaggtatttgccagctcttgta

SEQ ID NO: 20000 - RNA, 22 nt, synthetic construct
  source 1..22: mol_type = other RNA
aaggtggcctggtactcctcct

SEQ ID NO: 20001 - RNA, 22 nt, synthetic construct
  source 1..22: mol_type = other RNA
aagtactgtttctgaaacatta

SEQ ID NO: 20002 - RNA, 22 nt, synthetic construct
  source 1..22: mol_type = other RNA
aagtatcagacaggctgggttt

SEQ ID NO: 20003 - RNA, 22 nt, synthetic construct
  source 1..22: mol_type = other RNA
aagtatgttctgtcccatttgc

SEQ ID NO: 20004 - RNA, 22 nt, synthetic construct
  source 1..22: mol_type = other RNA
aagtcataaagccagtaactgg

SEQ ID NO: 20005 - RNA, 22 nt, synthetic construct
  source 1..22: mol_type = other RNA
aagtgttagtgctactaaatat

SEQ ID NO: 20006 - RNA, 22 nt, synthetic construct
  source 1..22: mol_type = other RNA
aagttttggaagcttaaataac

SEQ ID NO: 20007 - RNA, 22 nt, synthetic construct
  source 1..22: mol_type = other RNA
aataactctccaaaagtcataa

SEQ ID NO: 20008 - RNA, 22 nt, synthetic construct
  source 1..22: mol_type = other RNA
aatacaacagggataggtgagg

SEQ ID NO: 20009 - RNA, 22 nt, synthetic construct
  source 1..22: mol_type = other RNA
aatacacttatattcagggtac

SEQ ID NO: 20010 - RNA, 22 nt, synthetic construct
  source 1..22: mol_type = other RNA
aataccttaaatggttgagttg

SEQ ID NO: 20011 - RNA, 22 nt, synthetic construct
  source 1..22: mol_type = other RNA
aatatattcccaacctggctag

SEQ ID NO: 20012 - RNA, 22 nt, synthetic construct
  source 1..22: mol_type = other RNA
aatatattgcctaatgtttcag

SEQ ID NO: 20013 - RNA, 22 nt, synthetic construct
  source 1..22: mol_type = other RNA
aatattttcttcccacttcccc

SEQ ID NO: 20014 - RNA, 22 nt, synthetic construct
  source 1..22: mol_type = other RNA
aatcacctgtggatgctaatta

SEQ ID NO: 20015 - RNA, 22 nt, synthetic construct
  source 1..22: mol_type = other RNA
aatcaggtcttcattagattcc

SEQ ID NO: 20016 - RNA, 22 nt, synthetic construct
  source 1..22: mol_type = other RNA
aatccacctcttgatggggcta

SEQ ID NO: 20017 - RNA, 22 nt, synthetic construct
  source 1..22: mol_type = other RNA
aatcccactgtcacatgcatta

SEQ ID NO: 20018 - RNA, 22 nt, synthetic construct
  source 1..22: mol_type = other RNA
aatctaatgaagacctgatttt

SEQ ID NO: 20019 - RNA, 22 nt, synthetic construct
  source 1..22: mol_type = other RNA
aatctgtatatttagtagcact

SEQ ID NO: 20020 - RNA, 22 nt, synthetic construct
  source 1..22: mol_type = other RNA
aatctgtgctctgatccctgag

SEQ ID NO: 20021 - RNA, 22 nt, synthetic construct
  source 1..22: mol_type = other RNA
aatcttgccgccttccctcaaa

SEQ ID NO: 20022 - RNA, 22 nt, synthetic construct
  source 1..22: mol_type = other RNA
aatcttttctaagaagaggaca

SEQ ID NO: 20023 - RNA, 22 nt, synthetic construct
  source 1..22: mol_type = other RNA
aatgaagagaagtgttagtgct

SEQ ID NO: 20024 - RNA, 22 nt, synthetic construct
  source 1..22: mol_type = other RNA
aatgagaggcatgactagacca

SEQ ID NO: 20025 - RNA, 22 nt, synthetic construct
  source 1..22: mol_type = other RNA
aatgatagggtgtttctagaga

SEQ ID NO: 20026 - RNA, 22 nt, synthetic construct
  source 1..22: mol_type = other RNA
aatgcatacaagagctggcaaa

SEQ ID NO: 20027 - RNA, 22 nt, synthetic construct
  source 1..22: mol_type = other RNA
aatgcatgtgacagtgggattt

SEQ ID NO: 20028 - RNA, 22 nt, synthetic construct
  source 1..22: mol_type = other RNA
aatgcctcagggatcagagcac

SEQ ID NO: 20029 - RNA, 22 nt, synthetic construct
  source 1..22: mol_type = other RNA
aatggaaagtatgttctgtccc

SEQ ID NO: 20030 - RNA, 22 nt, synthetic construct
  source 1..22: mol_type = other RNA
aatggagtaatgcatgtgacag

SEQ ID NO: 20031 - RNA, 22 nt, synthetic construct
  source 1..22: mol_type = other RNA
aatgggacagaacatactttcc

SEQ ID NO: 20032 - RNA, 22 nt, synthetic construct
  source 1..22: mol_type = other RNA
aatggttgagttggacccgata

SEQ ID NO: 20033 - RNA, 22 nt, synthetic construct
  source 1..22: mol_type = other RNA
aatgtttcagaaacagtacttt

SEQ ID NO: 20034 - RNA, 22 nt, synthetic construct
  source 1..22: mol_type = other RNA
aattaaaacgcaaatcccactg

SEQ ID NO: 20035 - RNA, 22 nt, synthetic construct
  source 1..22: mol_type = other RNA
aattaatttatgcccacagtaa

SEQ ID NO: 20036 - RNA, 22 nt, synthetic construct
  source 1..22: mol_type = other RNA
aattagcatccacaggtgattg

SEQ ID NO: 20037 - RNA, 22 nt, synthetic construct
  source 1..22: mol_type = other RNA
aattaggtacaaagtcagagag

SEQ ID NO: 20038 - RNA, 22 nt, synthetic construct
  source 1..22: mol_type = other RNA
aattcaaacccagcctgtctga

SEQ ID NO: 20039 - RNA, 22 nt, synthetic construct
  source 1..22: mol_type = other RNA
aatttatgcccacagtaaaaca

SEQ ID NO: 20040 - RNA, 22 nt, synthetic construct
  source 1..22: mol_type = other RNA
aatttgggctcaaccagttact

SEQ ID NO: 20041 - RNA, 22 nt, synthetic construct
  source 1..22: mol_type = other RNA
acaaaacctaaatgcatacaag

SEQ ID NO: 20042 - RNA, 22 nt, synthetic construct
  source 1..22: mol_type = other RNA
acaaaatcttgccgccttccct

SEQ ID NO: 20043 - RNA, 22 nt, synthetic construct
  source 1..22: mol_type = other RNA
acaaagaaacaaaacctaaatg

SEQ ID NO: 20044 - RNA, 22 nt, synthetic construct
  source 1..22: mol_type = other RNA
acaaagtcagagaggggtctgg

SEQ ID NO: 20045 - RNA, 22 nt, synthetic construct
  source 1..22: mol_type = other RNA
acaacagggataggtgaggact

SEQ ID NO: 20046 - RNA, 22 nt, synthetic construct
  source 1..22: mol_type = other RNA
acaagagctggcaaatacctta

SEQ ID NO: 20047 - RNA, 22 nt, synthetic construct
  source 1..22: mol_type = other RNA
acaaggaggagtagctgccttt

SEQ ID NO: 20048 - RNA, 22 nt, synthetic construct
  source 1..22: mol_type = other RNA
acaagtatcagacaggctgggt

SEQ ID NO: 20049 - RNA, 22 nt, synthetic construct
  source 1..22: mol_type = other RNA
acacatatatttagtgtcaatc

SEQ ID NO: 20050 - RNA, 22 nt, synthetic construct
  source 1..22: mol_type = other RNA
acaccctatcattaaggaaagg

SEQ ID NO: 20051 - RNA, 22 nt, synthetic construct
  source 1..22: mol_type = other RNA
acacttatattcagggtacatg

SEQ ID NO: 20052 - RNA, 22 nt, synthetic construct
  source 1..22: mol_type = other RNA
acacttctcttcattttcaatg

SEQ ID NO: 20053 - RNA, 22 nt, synthetic construct
  source 1..22: mol_type = other RNA
acagaacatactttccattatg

SEQ ID NO: 20054 - RNA, 22 nt, synthetic construct
  source 1..22: mol_type = other RNA
acagagagttccaggcaggatg

SEQ ID NO: 20055 - RNA, 22 nt, synthetic construct
  source 1..22: mol_type = other RNA
acagattcatcctgcctggaac

SEQ ID NO: 20056 - RNA, 22 nt, synthetic construct
  source 1..22: mol_type = other RNA
acagattgacactaaatatatg

SEQ ID NO: 20057 - RNA, 22 nt, synthetic construct
  source 1..22: mol_type = other RNA
acagcaatcacctgtggatgct

SEQ ID NO: 20058 - RNA, 22 nt, synthetic construct
  source 1..22: mol_type = other RNA
acagcctcccagacaaggagga

SEQ ID NO: 20059 - RNA, 22 nt, synthetic construct
  source 1..22: mol_type = other RNA
acaggctgggtttgaatttggg

SEQ ID NO: 20060 - RNA, 22 nt, synthetic construct
  source 1..22: mol_type = other RNA
acagggataggtgaggactatg

SEQ ID NO: 20061 - RNA, 22 nt, synthetic construct
  source 1..22: mol_type = other RNA
acaggtgattgctgtaaactag

SEQ ID NO: 20062 - RNA, 22 nt, synthetic construct
  source 1..22: mol_type = other RNA
acagtaaaacaaaaacaaaacc

SEQ ID NO: 20063 - RNA, 22 nt, synthetic construct
  source 1..22: mol_type = other RNA
acagtactttccaaaatgagag

SEQ ID NO: 20064 - RNA, 22 nt, synthetic construct
  source 1..22: mol_type = other RNA
acagtgatgctctcacaaaatc

SEQ ID NO: 20065 - RNA, 22 nt, synthetic construct
  source 1..22: mol_type = other RNA
acagtgggatttgcgttttaat

SEQ ID NO: 20066 - RNA, 22 nt, synthetic construct
  source 1..22: mol_type = other RNA
acatactttccattatgatcaa

SEQ ID NO: 20067 - RNA, 22 nt, synthetic construct
  source 1..22: mol_type = other RNA
acatatatttagtgtcaatctg

SEQ ID NO: 20068 - RNA, 22 nt, synthetic construct
  source 1..22: mol_type = other RNA
acatattaaatgcctcagggat

SEQ ID NO: 20069 - RNA, 22 nt, synthetic construct
  source 1..22: mol_type = other RNA
acatgatcactaaaaggcagct

SEQ ID NO: 20070 - RNA, 22 nt, synthetic construct
  source 1..22: mol_type = other RNA
acatgcattactccatttgatc

SEQ ID NO: 20071 - RNA, 22 nt, synthetic construct
  source 1..22: mol_type = other RNA
acattaaaagctaagagagctc

SEQ ID NO: 20072 - RNA, 22 nt, synthetic construct
  source 1..22: mol_type = other RNA
acattaggcaatatattcccaa

SEQ ID NO: 20073 - RNA, 22 nt, synthetic construct
  source 1..22: mol_type = other RNA
accagatatatctctctagaaa

SEQ ID NO: 20074 - RNA, 22 nt, synthetic construct
  source 1..22: mol_type = other RNA
accaggccaccttgaccagata

SEQ ID NO: 20075 - RNA, 22 nt, synthetic construct
  source 1..22: mol_type = other RNA
accagttactggctttatgact

SEQ ID NO: 20076 - RNA, 22 nt, synthetic construct
  source 1..22: mol_type = other RNA
accatccatggggaagtgggaa

SEQ ID NO: 20077 - RNA, 22 nt, synthetic construct
  source 1..22: mol_type = other RNA
accatttaaggtatttgccagc

SEQ ID NO: 20078 - RNA, 22 nt, synthetic construct
  source 1..22: mol_type = other RNA
acccagcctgtctgatacttgt

SEQ ID NO: 20079 - RNA, 22 nt, synthetic construct
  source 1..22: mol_type = other RNA
acccctctctgactttgtacct

SEQ ID NO: 20080 - RNA, 22 nt, synthetic construct
  source 1..22: mol_type = other RNA
acccgataaaatacaacaggga

SEQ ID NO: 20081 - RNA, 22 nt, synthetic construct
  source 1..22: mol_type = other RNA
accctatcattaaggaaaggct

SEQ ID NO: 20082 - RNA, 22 nt, synthetic construct
  source 1..22: mol_type = other RNA
accctgaatataagtgtattta

SEQ ID NO: 20083 - RNA, 22 nt, synthetic construct
  source 1..22: mol_type = other RNA
acctaaatgcatacaagagctg

SEQ ID NO: 20084 - RNA, 22 nt, synthetic construct
  source 1..22: mol_type = other RNA
acctaatttcatgagctaaaaa

SEQ ID NO: 20085 - RNA, 22 nt, synthetic construct
  source 1..22: mol_type = other RNA
acctatccctgttgtattttat

SEQ ID NO: 20086 - RNA, 22 nt, synthetic construct
  source 1..22: mol_type = other RNA
acctcttgatggggctagtagc

SEQ ID NO: 20087 - RNA, 22 nt, synthetic construct
  source 1..22: mol_type = other RNA
acctggctagtttacagcaatc

SEQ ID NO: 20088 - RNA, 22 nt, synthetic construct
  source 1..22: mol_type = other RNA
acctgtggatgctaattaaaac

SEQ ID NO: 20089 - RNA, 22 nt, synthetic construct
  source 1..22: mol_type = other RNA
acctgtgtgtgggttttgtttt

SEQ ID NO: 20090 - RNA, 22 nt, synthetic construct
  source 1..22: mol_type = other RNA
accttaaatggttgagttggac

SEQ ID NO: 20091 - RNA, 22 nt, synthetic construct
  source 1..22: mol_type = other RNA
accttgaccagatatatctctc

SEQ ID NO: 20092 - RNA, 22 nt, synthetic construct
  source 1..22: mol_type = other RNA
acgcaaatcccactgtcacatg

SEQ ID NO: 20093 - RNA, 22 nt, synthetic construct
  source 1..22: mol_type = other RNA
actaaaaggcagctactcctcc

SEQ ID NO: 20094 - RNA, 22 nt, synthetic construct
  source 1..22: mol_type = other RNA
actaaatatacagattgacact

SEQ ID NO: 20095 - RNA, 22 nt, synthetic construct
  source 1..22: mol_type = other RNA
actaacacttctcttcattttc

SEQ ID NO: 20096 - RNA, 22 nt, synthetic construct
  source 1..22: mol_type = other RNA
actagaccatccatggggaagt

SEQ ID NO: 20097 - RNA, 22 nt, synthetic construct
  source 1..22: mol_type = other RNA
actagccaggttgggaatatat

SEQ ID NO: 20098 - RNA, 22 nt, synthetic construct
  source 1..22: mol_type = other RNA
actagccccatcaagaggtgga

SEQ ID NO: 20099 - RNA, 22 nt, synthetic construct
  source 1..22: mol_type = other RNA
actatggcaaatgggacagaac

SEQ ID NO: 20100 - RNA, 22 nt, synthetic construct
  source 1..22: mol_type = other RNA
actcaaccatttaaggtatttg

SEQ ID NO: 20101 - RNA, 22 nt, synthetic construct
  source 1..22: mol_type = other RNA
actccatttgatcataatggaa

SEQ ID NO: 20102 - RNA, 22 nt, synthetic construct
  source 1..22: mol_type = other RNA
actcctccttctccccacagcc

SEQ ID NO: 20103 - RNA, 22 nt, synthetic construct
  source 1..22: mol_type = other RNA
actcctccttgtctgggaggct

SEQ ID NO: 20104 - RNA, 22 nt, synthetic construct
  source 1..22: mol_type = other RNA
actctccaaaagtcataaagcc

SEQ ID NO: 20105 - RNA, 22 nt, synthetic construct
  source 1..22: mol_type = other RNA
actctctgtttgagggaaggcg

SEQ ID NO: 20106 - RNA, 22 nt, synthetic construct
  source 1..22: mol_type = other RNA
actgaaaaattaatttatgccc

SEQ ID NO: 20107 - RNA, 22 nt, synthetic construct
  source 1..22: mol_type = other RNA
actggctttatgacttttggag

SEQ ID NO: 20108 - RNA, 22 nt, synthetic construct
  source 1..22: mol_type = other RNA
actggttgagcccaaattcaaa

SEQ ID NO: 20109 - RNA, 22 nt, synthetic construct
  source 1..22: mol_type = other RNA
actgtaatcttttctaagaaga

SEQ ID NO: 20110 - RNA, 22 nt, synthetic construct
  source 1..22: mol_type = other RNA
actgtcacatgcattactccat

SEQ ID NO: 20111 - RNA, 22 nt, synthetic construct
  source 1..22: mol_type = other RNA
actgtgggcataaattaatttt

SEQ ID NO: 20112 - RNA, 22 nt, synthetic construct
  source 1..22: mol_type = other RNA
actgtttctgaaacattaggca

SEQ ID NO: 20113 - RNA, 22 nt, synthetic construct
  source 1..22: mol_type = other RNA
acttatattcagggtacatgat

SEQ ID NO: 20114 - RNA, 22 nt, synthetic construct
  source 1..22: mol_type = other RNA
acttccccatggatggtctagt

SEQ ID NO: 20115 - RNA, 22 nt, synthetic construct
  source 1..22: mol_type = other RNA
acttctcttcattttcaatgaa

SEQ ID NO: 20116 - RNA, 22 nt, synthetic construct
  source 1..22: mol_type = other RNA
acttgtcctcttcttagaaaag

SEQ ID NO: 20117 - RNA, 22 nt, synthetic construct
  source 1..22: mol_type = other RNA
actttccaaaatgagaggcatg

SEQ ID NO: 20118 - RNA, 22 nt, synthetic construct
  source 1..22: mol_type = other RNA
actttccattatgatcaaatgg

SEQ ID NO: 20119 - RNA, 22 nt, synthetic construct
  source 1..22: mol_type = other RNA
actttgtacctaatttcatgag

SEQ ID NO: 20120 - RNA, 22 nt, synthetic construct
  source 1..22: mol_type = other RNA
acttttggagagttatttaagc

SEQ ID NO: 20121 - RNA, 22 nt, synthetic construct
  source 1..22: mol_type = other RNA
agaaaagattacagtgatgctc

SEQ ID NO: 20122 - RNA, 22 nt, synthetic construct
  source 1..22: mol_type = other RNA
agaaacaaaacctaaatgcata

SEQ ID NO: 20123 - RNA, 22 nt, synthetic construct
  source 1..22: mol_type = other RNA
agaaacaccctatcattaagga

SEQ ID NO: 20124 - RNA, 22 nt, synthetic construct
  source 1..22: mol_type = other RNA
agaaacagtactttccaaaatg

SEQ ID NO: 20125 - RNA, 22 nt, synthetic construct
  source 1..22: mol_type = other RNA
agaacatactttccattatgat

SEQ ID NO: 20126 - RNA, 22 nt, synthetic construct
  source 1..22: mol_type = other RNA
agaacatattaaatgcctcagg

SEQ ID NO: 20127 - RNA, 22 nt, synthetic construct
  source 1..22: mol_type = other RNA
agaagaggacaagtatcagaca

SEQ ID NO: 20128 - RNA, 22 nt, synthetic construct
  source 1..22: mol_type = other RNA
agaagctcagatgcaaagagct

SEQ ID NO: 20129 - RNA, 22 nt, synthetic construct
  source 1..22: mol_type = other RNA
agaaggaggagtaccaggccac

SEQ ID NO: 20130 - RNA, 22 nt, synthetic construct
  source 1..22: mol_type = other RNA
agaagtgttagtgctactaaat

SEQ ID NO: 20131 - RNA, 22 nt, synthetic construct
  source 1..22: mol_type = other RNA
agacaaggaggagtagctgcct

SEQ ID NO: 20132 - RNA, 22 nt, synthetic construct
  source 1..22: mol_type = other RNA
agacaggctgggtttgaatttg

SEQ ID NO: 20133 - RNA, 22 nt, synthetic construct
  source 1..22: mol_type = other RNA
agaccatccatggggaagtggg

SEQ ID NO: 20134 - RNA, 22 nt, synthetic construct
  source 1..22: mol_type = other RNA
agacccctctctgactttgtac

SEQ ID NO: 20135 - RNA, 22 nt, synthetic construct
  source 1..22: mol_type = other RNA
agagaagtgttagtgctactaa

SEQ ID NO: 20136 - RNA, 22 nt, synthetic construct
  source 1..22: mol_type = other RNA
agagagatatatctggtcaagg

SEQ ID NO: 20137 - RNA, 22 nt, synthetic construct
  source 1..22: mol_type = other RNA
agagagctctttgcatctgagc

SEQ ID NO: 20138 - RNA, 22 nt, synthetic construct
  source 1..22: mol_type = other RNA
agagagttccaggcaggatgaa

SEQ ID NO: 20139 - RNA, 22 nt, synthetic construct
  source 1..22: mol_type = other RNA
agagatatatctggtcaaggtg

SEQ ID NO: 20140 - RNA, 22 nt, synthetic construct
  source 1..22: mol_type = other RNA
agagcacagattcatcctgcct

SEQ ID NO: 20141 - RNA, 22 nt, synthetic construct
  source 1..22: mol_type = other RNA
agagcatcactgtaatcttttc

SEQ ID NO: 20142 - RNA, 22 nt, synthetic construct
  source 1..22: mol_type = other RNA
agagctctcttagcttttaatg

SEQ ID NO: 20143 - RNA, 22 nt, synthetic construct
  source 1..22: mol_type = other RNA
agagctctttgcatctgagctt

SEQ ID NO: 20144 - RNA, 22 nt, synthetic construct
  source 1..22: mol_type = other RNA
agagctggcaaataccttaaat

SEQ ID NO: 20145 - RNA, 22 nt, synthetic construct
  source 1..22: mol_type = other RNA
agaggacaagtatcagacaggc

SEQ ID NO: 20146 - RNA, 22 nt, synthetic construct
  source 1..22: mol_type = other RNA
agaggcatgactagaccatcca

SEQ ID NO: 20147 - RNA, 22 nt, synthetic construct
  source 1..22: mol_type = other RNA
agaggtggattggggaatctaa

SEQ ID NO: 20148 - RNA, 22 nt, synthetic construct
  source 1..22: mol_type = other RNA
agagttatttaagcttccaaaa

SEQ ID NO: 20149 - RNA, 22 nt, synthetic construct
  source 1..22: mol_type = other RNA
agagttccaggcaggatgaatc

SEQ ID NO: 20150 - RNA, 22 nt, synthetic construct
  source 1..22: mol_type = other RNA
agatatatctctctagaaacac

SEQ ID NO: 20151 - RNA, 22 nt, synthetic construct
  source 1..22: mol_type = other RNA
agatatatctggtcaaggtggc

SEQ ID NO: 20152 - RNA, 22 nt, synthetic construct
  source 1..22: mol_type = other RNA
agatgcaaagagctctcttagc

SEQ ID NO: 20153 - RNA, 22 nt, synthetic construct
  source 1..22: mol_type = other RNA
agattacagtgatgctctcaca

SEQ ID NO: 20154 - RNA, 22 nt, synthetic construct
  source 1..22: mol_type = other RNA
agattcatcctgcctggaactc

SEQ ID NO: 20155 - RNA, 22 nt, synthetic construct
  source 1..22: mol_type = other RNA
agattccccaatccacctcttg

SEQ ID NO: 20156 - RNA, 22 nt, synthetic construct
  source 1..22: mol_type = other RNA
agattgacactaaatatatgtg

SEQ ID NO: 20157 - RNA, 22 nt, synthetic construct
  source 1..22: mol_type = other RNA
agattttgtgagagcatcactg

SEQ ID NO: 20158 - RNA, 22 nt, synthetic construct
  source 1..22: mol_type = other RNA
agcaatcacctgtggatgctaa

SEQ ID NO: 20159 - RNA, 22 nt, synthetic construct
  source 1..22: mol_type = other RNA
agcacagattcatcctgcctgg

SEQ ID NO: 20160 - RNA, 22 nt, synthetic construct
  source 1..22: mol_type = other RNA
agcactaacacttctcttcatt

SEQ ID NO: 20161 - RNA, 22 nt, synthetic construct
  source 1..22: mol_type = other RNA
agcatcactgtaatcttttcta

SEQ ID NO: 20162 - RNA, 22 nt, synthetic construct
  source 1..22: mol_type = other RNA
agcatccacaggtgattgctgt

SEQ ID NO: 20163 - RNA, 22 nt, synthetic construct
  source 1..22: mol_type = other RNA
agccaggttgggaatatattgc

SEQ ID NO: 20164 - RNA, 22 nt, synthetic construct
  source 1..22: mol_type = other RNA
agccagtaactggttgagccca

SEQ ID NO: 20165 - RNA, 22 nt, synthetic construct
  source 1..22: mol_type = other RNA
agcccaaattcaaacccagcct

SEQ ID NO: 20166 - RNA, 22 nt, synthetic construct
  source 1..22: mol_type = other RNA
agccccatcaagaggtggattg

SEQ ID NO: 20167 - RNA, 22 nt, synthetic construct
  source 1..22: mol_type = other RNA
agcctcccagacaaggaggagt

SEQ ID NO: 20168 - RNA, 22 nt, synthetic construct
  source 1..22: mol_type = other RNA
agcctgtctgatacttgtcctc

SEQ ID NO: 20169 - RNA, 22 nt, synthetic construct
  source 1..22: mol_type = other RNA
agcctttccttaatgatagggt

SEQ ID NO: 20170 - RNA, 22 nt, synthetic construct
  source 1..22: mol_type = other RNA
agctaagagagctctttgcatc

SEQ ID NO: 20171 - RNA, 22 nt, synthetic construct
  source 1..22: mol_type = other RNA
agctactcctccttgtctggga

SEQ ID NO: 20172 - RNA, 22 nt, synthetic construct
  source 1..22: mol_type = other RNA
agctcagatgcaaagagctctc

SEQ ID NO: 20173 - RNA, 22 nt, synthetic construct
  source 1..22: mol_type = other RNA
agctcatgaaattaggtacaaa

SEQ ID NO: 20174 - RNA, 22 nt, synthetic construct
  source 1..22: mol_type = other RNA
agctctcttagcttttaatgtt

SEQ ID NO: 20175 - RNA, 22 nt, synthetic construct
  source 1..22: mol_type = other RNA
agctcttgtatgcatttaggtt

SEQ ID NO: 20176 - RNA, 22 nt, synthetic construct
  source 1..22: mol_type = other RNA
agctctttgcatctgagcttct

SEQ ID NO: 20177 - RNA, 22 nt, synthetic construct
  source 1..22: mol_type = other RNA
agctgccttttagtgatcatgt

SEQ ID NO: 20178 - RNA, 22 nt, synthetic construct
  source 1..22: mol_type = other RNA
agctggcaaataccttaaatgg

SEQ ID NO: 20179 - RNA, 22 nt, synthetic construct
  source 1..22: mol_type = other RNA
agcttaaataactctccaaaag

SEQ ID NO: 20180 - RNA, 22 nt, synthetic construct
  source 1..22: mol_type = other RNA
agcttccaaaacttaactgaaa

SEQ ID NO: 20181 - RNA, 22 nt, synthetic construct
  source 1..22: mol_type = other RNA
aggaaaggctactagccccatc

SEQ ID NO: 20182 - RNA, 22 nt, synthetic construct
  source 1..22: mol_type = other RNA
aggacaagtatcagacaggctg

SEQ ID NO: 20183 - RNA, 22 nt, synthetic construct
  source 1..22: mol_type = other RNA
aggactatggcaaatgggacag

SEQ ID NO: 20184 - RNA, 22 nt, synthetic construct
  source 1..22: mol_type = other RNA
aggaggagtaccaggccacctt

SEQ ID NO: 20185 - RNA, 22 nt, synthetic construct
  source 1..22: mol_type = other RNA
aggaggagtagctgccttttag

SEQ ID NO: 20186 - RNA, 22 nt, synthetic construct
  source 1..22: mol_type = other RNA
aggagtaccaggccaccttgac

SEQ ID NO: 20187 - RNA, 22 nt, synthetic construct
  source 1..22: mol_type = other RNA
aggagtagctgccttttagtga

SEQ ID NO: 20188 - RNA, 22 nt, synthetic construct
  source 1..22: mol_type = other RNA
aggatgaatctgtgctctgatc

SEQ ID NO: 20189 - RNA, 22 nt, synthetic construct
  source 1..22: mol_type = other RNA
aggcaatatattcccaacctgg

SEQ ID NO: 20190 - RNA, 22 nt, synthetic construct
  source 1..22: mol_type = other RNA
aggcagctactcctccttgtct

SEQ ID NO: 20191 - RNA, 22 nt, synthetic construct
  source 1..22: mol_type = other RNA
aggcaggatgaatctgtgctct

SEQ ID NO: 20192 - RNA, 22 nt, synthetic construct
  source 1..22: mol_type = other RNA
aggcatgactagaccatccatg

SEQ ID NO: 20193 - RNA, 22 nt, synthetic construct
  source 1..22: mol_type = other RNA
aggccaccttgaccagatatat

SEQ ID NO: 20194 - RNA, 22 nt, synthetic construct
  source 1..22: mol_type = other RNA
aggcggcaagattttgtgagag

SEQ ID NO: 20195 - RNA, 22 nt, synthetic construct
  source 1..22: mol_type = other RNA
aggctactagccccatcaagag

SEQ ID NO: 20196 - RNA, 22 nt, synthetic construct
  source 1..22: mol_type = other RNA
aggctgggtttgaatttgggct

SEQ ID NO: 20197 - RNA, 22 nt, synthetic construct
  source 1..22: mol_type = other RNA
aggctgtggggagaaggaggag

SEQ ID NO: 20198 - RNA, 22 nt, synthetic construct
  source 1..22: mol_type = other RNA
agggaaggcggcaagattttgt

SEQ ID NO: 20199 - RNA, 22 nt, synthetic construct
  source 1..22: mol_type = other RNA
agggataggtgaggactatggc

SEQ ID NO: 20200 - RNA, 22 nt, synthetic construct
  source 1..22: mol_type = other RNA
agggatcagagcacagattcat

SEQ ID NO: 20201 - RNA, 22 nt, synthetic construct
  source 1..22: mol_type = other RNA
agggtacatgatcactaaaagg

SEQ ID NO: 20202 - RNA, 22 nt, synthetic construct
  source 1..22: mol_type = other RNA
agggtgtttctagagagatata

SEQ ID NO: 20203 - RNA, 22 nt, synthetic construct
  source 1..22: mol_type = other RNA
aggtacaaagtcagagaggggt

SEQ ID NO: 20204 - RNA, 22 nt, synthetic construct
  source 1..22: mol_type = other RNA
aggtatttgccagctcttgtat

SEQ ID NO: 20205 - RNA, 22 nt, synthetic construct
  source 1..22: mol_type = other RNA
aggtcttcattagattccccaa

SEQ ID NO: 20206 - RNA, 22 nt, synthetic construct
  source 1..22: mol_type = other RNA
aggtgaggactatggcaaatgg

SEQ ID NO: 20207 - RNA, 22 nt, synthetic construct
  source 1..22: mol_type = other RNA
aggtgattgctgtaaactagcc

SEQ ID NO: 20208 - RNA, 22 nt, synthetic construct
  source 1..22: mol_type = other RNA
aggtggattggggaatctaatg

SEQ ID NO: 20209 - RNA, 22 nt, synthetic construct
  source 1..22: mol_type = other RNA
aggtggcctggtactcctcctt

SEQ ID NO: 20210 - RNA, 22 nt, synthetic construct
  source 1..22: mol_type = other RNA
aggttgggaatatattgcctaa

SEQ ID NO: 20211 - RNA, 22 nt, synthetic construct
  source 1..22: mol_type = other RNA
agtaaaacaaaaacaaaaccca

SEQ ID NO: 20212 - RNA, 22 nt, synthetic construct
  source 1..22: mol_type = other RNA
agtaactggttgagcccaaatt

SEQ ID NO: 20213 - RNA, 22 nt, synthetic construct
  source 1..22: mol_type = other RNA
agtaatgcatgtgacagtggga

SEQ ID NO: 20214 - RNA, 22 nt, synthetic construct
  source 1..22: mol_type = other RNA
agtaccaggccaccttgaccag

SEQ ID NO: 20215 - RNA, 22 nt, synthetic construct
  source 1..22: mol_type = other RNA
agtactgtttctgaaacattag

SEQ ID NO: 20216 - RNA, 22 nt, synthetic construct
  source 1..22: mol_type = other RNA
agtactttccaaaatgagaggc

SEQ ID NO: 20217 - RNA, 22 nt, synthetic construct
  source 1..22: mol_type = other RNA
agtagcactaacacttctcttc

SEQ ID NO: 20218 - RNA, 22 nt, synthetic construct
  source 1..22: mol_type = other RNA
agtagcctttccttaatgatag

SEQ ID NO: 20219 - RNA, 22 nt, synthetic construct
  source 1..22: mol_type = other RNA
agtagctgccttttagtgatca

SEQ ID NO: 20220 - RNA, 22 nt, synthetic construct
  source 1..22: mol_type = other RNA
agtatcagacaggctgggtttg

SEQ ID NO: 20221 - RNA, 22 nt, synthetic construct
  source 1..22: mol_type = other RNA
agtatgttctgtcccatttgcc

SEQ ID NO: 20222 - RNA, 22 nt, synthetic construct
  source 1..22: mol_type = other RNA
agtcataaagccagtaactggt

SEQ ID NO: 20223 - RNA, 22 nt, synthetic construct
  source 1..22: mol_type = other RNA
agtcatgcctctcattttggaa

SEQ ID NO: 20224 - RNA, 22 nt, synthetic construct
  source 1..22: mol_type = other RNA
agtcctcacctatccctgttgt

SEQ ID NO: 20225 - RNA, 22 nt, synthetic construct
  source 1..22: mol_type = other RNA
agtgatcatgtaccctgaatat

SEQ ID NO: 20226 - RNA, 22 nt, synthetic construct
  source 1..22: mol_type = other RNA
agtgatgctctcacaaaatctt

SEQ ID NO: 20227 - RNA, 22 nt, synthetic construct
  source 1..22: mol_type = other RNA
agtgctactaaatatacagatt

SEQ ID NO: 20228 - RNA, 22 nt, synthetic construct
  source 1..22: mol_type = other RNA
agtgggatttgcgttttaatta

SEQ ID NO: 20229 - RNA, 22 nt, synthetic construct
  source 1..22: mol_type = other RNA
agtgtcaatctgtatatttagt

SEQ ID NO: 20230 - RNA, 22 nt, synthetic construct
  source 1..22: mol_type = other RNA
agtgttagtgctactaaatata

SEQ ID NO: 20231 - RNA, 22 nt, synthetic construct
  source 1..22: mol_type = other RNA
agttaagttttggaagcttaaa

SEQ ID NO: 20232 - RNA, 22 nt, synthetic construct
  source 1..22: mol_type = other RNA
agttactggctttatgactttt

SEQ ID NO: 20233 - RNA, 22 nt, synthetic construct
  source 1..22: mol_type = other RNA
agttatttaagcttccaaaact

SEQ ID NO: 20234 - RNA, 22 nt, synthetic construct
  source 1..22: mol_type = other RNA
agttccaggcaggatgaatctg

SEQ ID NO: 20235 - RNA, 22 nt, synthetic construct
  source 1..22: mol_type = other RNA
agttggacccgataaaatacaa

SEQ ID NO: 20236 - RNA, 22 nt, synthetic construct
  source 1..22: mol_type = other RNA
agtttacagcaatcacctgtgg

SEQ ID NO: 20237 - RNA, 22 nt, synthetic construct
  source 1..22: mol_type = other RNA
agttttggaagcttaaataact

SEQ ID NO: 20238 - RNA, 22 nt, synthetic construct
  source 1..22: mol_type = other RNA
ataaaatacaacagggataggt

SEQ ID NO: 20239 - RNA, 22 nt, synthetic construct
  source 1..22: mol_type = other RNA
ataaagccagtaactggttgag

SEQ ID NO: 20240 - RNA, 22 nt, synthetic construct
  source 1..22: mol_type = other RNA
ataacattaaaagctaagagag

SEQ ID NO: 20241 - RNA, 22 nt, synthetic construct
  source 1..22: mol_type = other RNA
ataactctccaaaagtcataaa

SEQ ID NO: 20242 - RNA, 22 nt, synthetic construct
  source 1..22: mol_type = other RNA
ataagaacatattaaatgcctc

SEQ ID NO: 20243 - RNA, 22 nt, synthetic construct
  source 1..22: mol_type = other RNA
ataatattttcttcccacttcc

SEQ ID NO: 20244 - RNA, 22 nt, synthetic construct
  source 1..22: mol_type = other RNA
ataatggaaagtatgttctgtc

SEQ ID NO: 20245 - RNA, 22 nt, synthetic construct
  source 1..22: mol_type = other RNA
atacaacagggataggtgagga

SEQ ID NO: 20246 - RNA, 22 nt, synthetic construct
  source 1..22: mol_type = other RNA
atacaagagctggcaaatacct

SEQ ID NO: 20247 - RNA, 22 nt, synthetic construct
  source 1..22: mol_type = other RNA
atacacttatattcagggtaca

SEQ ID NO: 20248 - RNA, 22 nt, synthetic construct
  source 1..22: mol_type = other RNA
ataccttaaatggttgagttgg

SEQ ID NO: 20249 - RNA, 22 nt, synthetic construct
  source 1..22: mol_type = other RNA
atacttgtcctcttcttagaaa

SEQ ID NO: 20250 - RNA, 22 nt, synthetic construct
  source 1..22: mol_type = other RNA
atagggtgtttctagagagata

SEQ ID NO: 20251 - RNA, 22 nt, synthetic construct
  source 1..22: mol_type = other RNA
ataggtgaggactatggcaaat

SEQ ID NO: 20252 - RNA, 22 nt, synthetic construct
  source 1..22: mol_type = other RNA
atagtcctcacctatccctgtt

SEQ ID NO: 20253 - RNA, 22 nt, synthetic construct
  source 1..22: mol_type = other RNA
atatatctctctagaaacaccc

SEQ ID NO: 20254 - RNA, 22 nt, synthetic construct
  source 1..22: mol_type = other RNA
atatatctggtcaaggtggcct

SEQ ID NO: 20255 - RNA, 22 nt, synthetic construct
  source 1..22: mol_type = other RNA
atatattcccaacctggctagt

SEQ ID NO: 20256 - RNA, 22 nt, synthetic construct
  source 1..22: mol_type = other RNA
atatattgcctaatgtttcaga

SEQ ID NO: 20257 - RNA, 22 nt, synthetic construct
  source 1..22: mol_type = other RNA
atatctctctagaaacacccta

SEQ ID NO: 20258 - RNA, 22 nt, synthetic construct
  source 1..22: mol_type = other RNA
atatctggtcaaggtggcctgg

SEQ ID NO: 20259 - RNA, 22 nt, synthetic construct
  source 1..22: mol_type = other RNA
atatgccagacccctctctgac

SEQ ID NO: 20260 - RNA, 22 nt, synthetic construct
  source 1..22: mol_type = other RNA
atattaaatgcctcagggatca

SEQ ID NO: 20261 - RNA, 22 nt, synthetic construct
  source 1..22: mol_type = other RNA
atattcagggtacatgatcact

SEQ ID NO: 20262 - RNA, 22 nt, synthetic construct
  source 1..22: mol_type = other RNA
atattcccaacctggctagttt

SEQ ID NO: 20263 - RNA, 22 nt, synthetic construct
  source 1..22: mol_type = other RNA
atattgcctaatgtttcagaaa

SEQ ID NO: 20264 - RNA, 22 nt, synthetic construct
  source 1..22: mol_type = other RNA
atatttagtagcactaacactt

SEQ ID NO: 20265 - RNA, 22 nt, synthetic construct
  source 1..22: mol_type = other RNA
atattttcttcccacttcccca

SEQ ID NO: 20266 - RNA, 22 nt, synthetic construct
  source 1..22: mol_type = other RNA
atcaaatggagtaatgcatgtg

SEQ ID NO: 20267 - RNA, 22 nt, synthetic construct
  source 1..22: mol_type = other RNA
atcaagaggtggattggggaat

SEQ ID NO: 20268 - RNA, 22 nt, synthetic construct
  source 1..22: mol_type = other RNA
atcacctgtggatgctaattaa

SEQ ID NO: 20269 - RNA, 22 nt, synthetic construct
  source 1..22: mol_type = other RNA
atcactaaaaggcagctactcc

SEQ ID NO: 20270 - RNA, 22 nt, synthetic construct
  source 1..22: mol_type = other RNA
atcactgtaatcttttctaaga

SEQ ID NO: 20271 - RNA, 22 nt, synthetic construct
  source 1..22: mol_type = other RNA
atcagacaggctgggtttgaat

SEQ ID NO: 20272 - RNA, 22 nt, synthetic construct
  source 1..22: mol_type = other RNA
atcagagcacagattcatcctg

SEQ ID NO: 20273 - RNA, 22 nt, synthetic construct
  source 1..22: mol_type = other RNA
atcaggtcttcattagattccc

SEQ ID NO: 20274 - RNA, 22 nt, synthetic construct
  source 1..22: mol_type = other RNA
atcataatggaaagtatgttct

SEQ ID NO: 20275 - RNA, 22 nt, synthetic construct
  source 1..22: mol_type = other RNA
atcatgtaccctgaatataagt

SEQ ID NO: 20276 - RNA, 22 nt, synthetic construct
  source 1..22: mol_type = other RNA
atcattaaggaaaggctactag

SEQ ID NO: 20277 - RNA, 22 nt, synthetic construct
  source 1..22: mol_type = other RNA
atccacaggtgattgctgtaaa

SEQ ID NO: 20278 - RNA, 22 nt, synthetic construct
  source 1..22: mol_type = other RNA
atccacctcttgatggggctag

SEQ ID NO: 20279 - RNA, 22 nt, synthetic construct
  source 1..22: mol_type = other RNA
atccatggggaagtgggaagaa

SEQ ID NO: 20280 - RNA, 22 nt, synthetic construct
  source 1..22: mol_type = other RNA
atcccactgtcacatgcattac

SEQ ID NO: 20281 - RNA, 22 nt, synthetic construct
  source 1..22: mol_type = other RNA
atccctgaggcatttaatatgt

SEQ ID NO: 20282 - RNA, 22 nt, synthetic construct
  source 1..22: mol_type = other RNA
atccctgttgtattttatcggg

SEQ ID NO: 20283 - RNA, 22 nt, synthetic construct
  source 1..22: mol_type = other RNA
atcctgcctggaactctctgtt

SEQ ID NO: 20284 - RNA, 22 nt, synthetic construct
  source 1..22: mol_type = other RNA
atcgggtccaactcaaccattt

SEQ ID NO: 20285 - RNA, 22 nt, synthetic construct
  source 1..22: mol_type = other RNA
atctaatgaagacctgattttt

SEQ ID NO: 20286 - RNA, 22 nt, synthetic construct
  source 1..22: mol_type = other RNA
atctctctagaaacaccctatc

SEQ ID NO: 20287 - RNA, 22 nt, synthetic construct
  source 1..22: mol_type = other RNA
atctgagcttctaataataaga

SEQ ID NO: 20288 - RNA, 22 nt, synthetic construct
  source 1..22: mol_type = other RNA
atctggtcaaggtggcctggta

SEQ ID NO: 20289 - RNA, 22 nt, synthetic construct
  source 1..22: mol_type = other RNA
atctgtatatttagtagcacta

SEQ ID NO: 20290 - RNA, 22 nt, synthetic construct
  source 1..22: mol_type = other RNA
atctgtgctctgatccctgagg

SEQ ID NO: 20291 - RNA, 22 nt, synthetic construct
  source 1..22: mol_type = other RNA
atcttgccgccttccctcaaac

SEQ ID NO: 20292 - RNA, 22 nt, synthetic construct
  source 1..22: mol_type = other RNA
atcttttctaagaagaggacaa

SEQ ID NO: 20293 - RNA, 22 nt, synthetic construct
  source 1..22: mol_type = other RNA
atgaaattaggtacaaagtcag

SEQ ID NO: 20294 - RNA, 22 nt, synthetic construct
  source 1..22: mol_type = other RNA
atgaagagaagtgttagtgcta

SEQ ID NO: 20295 - RNA, 22 nt, synthetic construct
  source 1..22: mol_type = other RNA
atgaatctgtgctctgatccct

SEQ ID NO: 20296 - RNA, 22 nt, synthetic construct
  source 1..22: mol_type = other RNA
atgactagaccatccatgggga

SEQ ID NO: 20297 - RNA, 22 nt, synthetic construct
  source 1..22: mol_type = other RNA
atgacttttggagagttattta

SEQ ID NO: 20298 - RNA, 22 nt, synthetic construct
  source 1..22: mol_type = other RNA
atgagaggcatgactagaccat

SEQ ID NO: 20299 - RNA, 22 nt, synthetic construct
  source 1..22: mol_type = other RNA
atgagctaaaaaacaaagaaac

SEQ ID NO: 20300 - RNA, 22 nt, synthetic construct
  source 1..22: mol_type = other RNA
atgatagggtgtttctagagag

SEQ ID NO: 20301 - RNA, 22 nt, synthetic construct
  source 1..22: mol_type = other RNA
atgatcaaatggagtaatgcat

SEQ ID NO: 20302 - RNA, 22 nt, synthetic construct
  source 1..22: mol_type = other RNA
atgatcactaaaaggcagctac

SEQ ID NO: 20303 - RNA, 22 nt, synthetic construct
  source 1..22: mol_type = other RNA
atgcaaagagctctcttagctt

SEQ ID NO: 20304 - RNA, 22 nt, synthetic construct
  source 1..22: mol_type = other RNA
atgcatacaagagctggcaaat

SEQ ID NO: 20305 - RNA, 22 nt, synthetic construct
  source 1..22: mol_type = other RNA
atgcatgtgacagtgggatttg

SEQ ID NO: 20306 - RNA, 22 nt, synthetic construct
  source 1..22: mol_type = other RNA
atgcattactccatttgatcat

SEQ ID NO: 20307 - RNA, 22 nt, synthetic construct
  source 1..22: mol_type = other RNA
atgcatttaggttttgtttctt

SEQ ID NO: 20308 - RNA, 22 nt, synthetic construct
  source 1..22: mol_type = other RNA
atgccagacccctctctgactt

SEQ ID NO: 20309 - RNA, 22 nt, synthetic construct
  source 1..22: mol_type = other RNA
atgcccacagtaaaacaaaaac

SEQ ID NO: 20310 - RNA, 22 nt, synthetic construct
  source 1..22: mol_type = other RNA
atgcctcagggatcagagcaca

SEQ ID NO: 20311 - RNA, 22 nt, synthetic construct
  source 1..22: mol_type = other RNA
atgcctctcattttggaaagta

SEQ ID NO: 20312 - RNA, 22 nt, synthetic construct
  source 1..22: mol_type = other RNA
atgctaattaaaacgcaaatcc

SEQ ID NO: 20313 - RNA, 22 nt, synthetic construct
  source 1..22: mol_type = other RNA
atgctctcacaaaatcttgccg

SEQ ID NO: 20314 - RNA, 22 nt, synthetic construct
  source 1..22: mol_type = other RNA
atggaaagtatgttctgtccca

SEQ ID NO: 20315 - RNA, 22 nt, synthetic construct
  source 1..22: mol_type = other RNA
atggagtaatgcatgtgacagt

SEQ ID NO: 20316 - RNA, 22 nt, synthetic construct
  source 1..22: mol_type = other RNA
atggatggtctagtcatgcctc

SEQ ID NO: 20317 - RNA, 22 nt, synthetic construct
  source 1..22: mol_type = other RNA
atggcaaatgggacagaacata

SEQ ID NO: 20318 - RNA, 22 nt, synthetic construct
  source 1..22: mol_type = other RNA
atgggacagaacatactttcca

SEQ ID NO: 20319 - RNA, 22 nt, synthetic construct
  source 1..22: mol_type = other RNA
atggggaagtgggaagaaaata

SEQ ID NO: 20320 - RNA, 22 nt, synthetic construct
  source 1..22: mol_type = other RNA
atggggctagtagcctttcctt

SEQ ID NO: 20321 - RNA, 22 nt, synthetic construct
  source 1..22: mol_type = other RNA
atggtctagtcatgcctctcat

SEQ ID NO: 20322 - RNA, 22 nt, synthetic construct
  source 1..22: mol_type = other RNA
atggttgagttggacccgataa

SEQ ID NO: 20323 - RNA, 22 nt, synthetic construct
  source 1..22: mol_type = other RNA
atgtaccctgaatataagtgta

SEQ ID NO: 20324 - RNA, 22 nt, synthetic construct
  source 1..22: mol_type = other RNA
atgtgacagtgggatttgcgtt

SEQ ID NO: 20325 - RNA, 22 nt, synthetic construct
  source 1..22: mol_type = other RNA
atgttctgtcccatttgccata

SEQ ID NO: 20326 - RNA, 22 nt, synthetic construct
  source 1..22: mol_type = other RNA
atgttcttattattagaagctc

SEQ ID NO: 20327 - RNA, 22 nt, synthetic construct
  source 1..22: mol_type = other RNA
atgtttcagaaacagtactttc

SEQ ID NO: 20328 - RNA, 22 nt, synthetic construct
  source 1..22: mol_type = other RNA
attaaaacgcaaatcccactgt

SEQ ID NO: 20329 - RNA, 22 nt, synthetic construct
  source 1..22: mol_type = other RNA
attaaaagctaagagagctctt

SEQ ID NO: 20330 - RNA, 22 nt, synthetic construct
  source 1..22: mol_type = other RNA
attaaatgcctcagggatcaga

SEQ ID NO: 20331 - RNA, 22 nt, synthetic construct
  source 1..22: mol_type = other RNA
attaaggaaaggctactagccc

SEQ ID NO: 20332 - RNA, 22 nt, synthetic construct
  source 1..22: mol_type = other RNA
attaatttatgcccacagtaaa

SEQ ID NO: 20333 - RNA, 22 nt, synthetic construct
  source 1..22: mol_type = other RNA
attacagtgatgctctcacaaa

SEQ ID NO: 20334 - RNA, 22 nt, synthetic construct
  source 1..22: mol_type = other RNA
attactccatttgatcataatg

SEQ ID NO: 20335 - RNA, 22 nt, synthetic construct
  source 1..22: mol_type = other RNA
attagaagctcagatgcaaaga

SEQ ID NO: 20336 - RNA, 22 nt, synthetic construct
  source 1..22: mol_type = other RNA
attagattccccaatccacctc

SEQ ID NO: 20337 - RNA, 22 nt, synthetic construct
  source 1..22: mol_type = other RNA
attagcatccacaggtgattgc

SEQ ID NO: 20338 - RNA, 22 nt, synthetic construct
  source 1..22: mol_type = other RNA
attaggcaatatattcccaacc

SEQ ID NO: 20339 - RNA, 22 nt, synthetic construct
  source 1..22: mol_type = other RNA
attaggtacaaagtcagagagg

SEQ ID NO: 20340 - RNA, 22 nt, synthetic construct
  source 1..22: mol_type = other RNA
attatgatcaaatggagtaatg

SEQ ID NO: 20341 - RNA, 22 nt, synthetic construct
  source 1..22: mol_type = other RNA
attattagaagctcagatgcaa

SEQ ID NO: 20342 - RNA, 22 nt, synthetic construct
  source 1..22: mol_type = other RNA
attcaaacccagcctgtctgat

SEQ ID NO: 20343 - RNA, 22 nt, synthetic construct
  source 1..22: mol_type = other RNA
attcagggtacatgatcactaa

SEQ ID NO: 20344 - RNA, 22 nt, synthetic construct
  source 1..22: mol_type = other RNA
attcatcctgcctggaactctc

SEQ ID NO: 20345 - RNA, 22 nt, synthetic construct
  source 1..22: mol_type = other RNA
attcccaacctggctagtttac

SEQ ID NO: 20346 - RNA, 22 nt, synthetic construct
  source 1..22: mol_type = other RNA
attccccaatccacctcttgat

SEQ ID NO: 20347 - RNA, 22 nt, synthetic construct
  source 1..22: mol_type = other RNA
attgaaaatgaagagaagtgtt

SEQ ID NO: 20348 - RNA, 22 nt, synthetic construct
  source 1..22: mol_type = other RNA
attgcctaatgtttcagaaaca

SEQ ID NO: 20349 - RNA, 22 nt, synthetic construct
  source 1..22: mol_type = other RNA
attgctgtaaactagccaggtt

SEQ ID NO: 20350 - RNA, 22 nt, synthetic construct
  source 1..22: mol_type = other RNA
attggggaatctaatgaagacc

SEQ ID NO: 20351 - RNA, 22 nt, synthetic construct
  source 1..22: mol_type = other RNA
atttaagcttccaaaacttaac

SEQ ID NO: 20352 - RNA, 22 nt, synthetic construct
  source 1..22: mol_type = other RNA
atttaaggtatttgccagctct

SEQ ID NO: 20353 - RNA, 22 nt, synthetic construct
  source 1..22: mol_type = other RNA
atttagtagcactaacacttct

SEQ ID NO: 20354 - RNA, 22 nt, synthetic construct
  source 1..22: mol_type = other RNA
atttatgcccacagtaaaacaa

SEQ ID NO: 20355 - RNA, 22 nt, synthetic construct
  source 1..22: mol_type = other RNA
atttgccagctcttgtatgcat

SEQ ID NO: 20356 - RNA, 22 nt, synthetic construct
  source 1..22: mol_type = other RNA
atttgccatagtcctcacctat

SEQ ID NO: 20357 - RNA, 22 nt, synthetic construct
  source 1..22: mol_type = other RNA
atttgcgttttaattagcatcc

SEQ ID NO: 20358 - RNA, 22 nt, synthetic construct
  source 1..22: mol_type = other RNA
atttgggctcaaccagttactg

SEQ ID NO: 20359 - RNA, 22 nt, synthetic construct
  source 1..22: mol_type = other RNA
attttatcgggtccaactcaac

SEQ ID NO: 20360 - RNA, 22 nt, synthetic construct
  source 1..22: mol_type = other RNA
attttcttcccacttccccatg

SEQ ID NO: 20361 - RNA, 22 nt, synthetic construct
  source 1..22: mol_type = other RNA
attttggaaagtactgtttctg

SEQ ID NO: 20362 - RNA, 22 nt, synthetic construct
  source 1..22: mol_type = other RNA
attttgtgagagcatcactgta

SEQ ID NO: 20363 - RNA, 22 nt, synthetic construct
  source 1..22: mol_type = other RNA
caaaacctaaatgcatacaaga

SEQ ID NO: 20364 - RNA, 22 nt, synthetic construct
  source 1..22: mol_type = other RNA
caaaagtcataaagccagtaac

SEQ ID NO: 20365 - RNA, 22 nt, synthetic construct
  source 1..22: mol_type = other RNA
caaaatcttgccgccttccctc

SEQ ID NO: 20366 - RNA, 22 nt, synthetic construct
  source 1..22: mol_type = other RNA
caaaatgagaggcatgactaga

SEQ ID NO: 20367 - RNA, 22 nt, synthetic construct
  source 1..22: mol_type = other RNA
caaacagagagttccaggcagg

SEQ ID NO: 20368 - RNA, 22 nt, synthetic construct
  source 1..22: mol_type = other RNA
caaacccagcctgtctgatact

SEQ ID NO: 20369 - RNA, 22 nt, synthetic construct
  source 1..22: mol_type = other RNA
caaagaaacaaaacctaaatgc

SEQ ID NO: 20370 - RNA, 22 nt, synthetic construct
  source 1..22: mol_type = other RNA
caaagagctctcttagctttta

SEQ ID NO: 20371 - RNA, 22 nt, synthetic construct
  source 1..22: mol_type = other RNA
caaataccttaaatggttgagt

SEQ ID NO: 20372 - RNA, 22 nt, synthetic construct
  source 1..22: mol_type = other RNA
caaatcccactgtcacatgcat

SEQ ID NO: 20373 - RNA, 22 nt, synthetic construct
  source 1..22: mol_type = other RNA
caaatggagtaatgcatgtgac

SEQ ID NO: 20374 - RNA, 22 nt, synthetic construct
  source 1..22: mol_type = other RNA
caaatgggacagaacatacttt

SEQ ID NO: 20375 - RNA, 22 nt, synthetic construct
  source 1..22: mol_type = other RNA
caaattcaaacccagcctgtct

SEQ ID NO: 20376 - RNA, 22 nt, synthetic construct
  source 1..22: mol_type = other RNA
caacagggataggtgaggacta

SEQ ID NO: 20377 - RNA, 22 nt, synthetic construct
  source 1..22: mol_type = other RNA
caaccagttactggctttatga

SEQ ID NO: 20378 - RNA, 22 nt, synthetic construct
  source 1..22: mol_type = other RNA
caaccatttaaggtatttgcca

SEQ ID NO: 20379 - RNA, 22 nt, synthetic construct
  source 1..22: mol_type = other RNA
caacctggctagtttacagcaa

SEQ ID NO: 20380 - RNA, 22 nt, synthetic construct
  source 1..22: mol_type = other RNA
caactcaaccatttaaggtatt

SEQ ID NO: 20381 - RNA, 22 nt, synthetic construct
  source 1..22: mol_type = other RNA
caagagctggcaaataccttaa

SEQ ID NO: 20382 - RNA, 22 nt, synthetic construct
  source 1..22: mol_type = other RNA
caagaggtggattggggaatct

SEQ ID NO: 20383 - RNA, 22 nt, synthetic construct
  source 1..22: mol_type = other RNA
caagattttgtgagagcatcac

SEQ ID NO: 20384 - RNA, 22 nt, synthetic construct
  source 1..22: mol_type = other RNA
caaggaggagtagctgcctttt

SEQ ID NO: 20385 - RNA, 22 nt, synthetic construct
  source 1..22: mol_type = other RNA
caaggtggcctggtactcctcc

SEQ ID NO: 20386 - RNA, 22 nt, synthetic construct
  source 1..22: mol_type = other RNA
caagtatcagacaggctgggtt

SEQ ID NO: 20387 - RNA, 22 nt, synthetic construct
  source 1..22: mol_type = other RNA
caatatattcccaacctggcta

SEQ ID NO: 20388 - RNA, 22 nt, synthetic construct
  source 1..22: mol_type = other RNA
caatcacctgtggatgctaatt

SEQ ID NO: 20389 - RNA, 22 nt, synthetic construct
  source 1..22: mol_type = other RNA
caatccacctcttgatggggct

SEQ ID NO: 20390 - RNA, 22 nt, synthetic construct
  source 1..22: mol_type = other RNA
caatctgtatatttagtagcac

SEQ ID NO: 20391 - RNA, 22 nt, synthetic construct
  source 1..22: mol_type = other RNA
cacaaaatcttgccgccttccc

SEQ ID NO: 20392 - RNA, 22 nt, synthetic construct
  source 1..22: mol_type = other RNA
cacagattcatcctgcctggaa

SEQ ID NO: 20393 - RNA, 22 nt, synthetic construct
  source 1..22: mol_type = other RNA
cacagcctcccagacaaggagg

SEQ ID NO: 20394 - RNA, 22 nt, synthetic construct
  source 1..22: mol_type = other RNA
cacaggtgattgctgtaaacta

SEQ ID NO: 20395 - RNA, 22 nt, synthetic construct
  source 1..22: mol_type = other RNA
cacagtaaaacaaaaacaaaac

SEQ ID NO: 20396 - RNA, 22 nt, synthetic construct
  source 1..22: mol_type = other RNA
cacatatatttagtgtcaatct

SEQ ID NO: 20397 - RNA, 22 nt, synthetic construct
  source 1..22: mol_type = other RNA
cacatgcattactccatttgat

SEQ ID NO: 20398 - RNA, 22 nt, synthetic construct
  source 1..22: mol_type = other RNA
caccctatcattaaggaaaggc

SEQ ID NO: 20399 - RNA, 22 nt, synthetic construct
  source 1..22: mol_type = other RNA
cacctatccctgttgtatttta

SEQ ID NO: 20400 - RNA, 22 nt, synthetic construct
  source 1..22: mol_type = other RNA
cacctcttgatggggctagtag

SEQ ID NO: 20401 - RNA, 22 nt, synthetic construct
  source 1..22: mol_type = other RNA
cacctgtggatgctaattaaaa

SEQ ID NO: 20402 - RNA, 22 nt, synthetic construct
  source 1..22: mol_type = other RNA
caccttgaccagatatatctct

SEQ ID NO: 20403 - RNA, 22 nt, synthetic construct
  source 1..22: mol_type = other RNA
cactaaaaggcagctactcctc

SEQ ID NO: 20404 - RNA, 22 nt, synthetic construct
  source 1..22: mol_type = other RNA
cactaacacttctcttcatttt

SEQ ID NO: 20405 - RNA, 22 nt, synthetic construct
  source 1..22: mol_type = other RNA
cactgtaatcttttctaagaag

SEQ ID NO: 20406 - RNA, 22 nt, synthetic construct
  source 1..22: mol_type = other RNA
cactgtcacatgcattactcca

SEQ ID NO: 20407 - RNA, 22 nt, synthetic construct
  source 1..22: mol_type = other RNA
cacttatattcagggtacatga

SEQ ID NO: 20408 - RNA, 22 nt, synthetic construct
  source 1..22: mol_type = other RNA
cacttccccatggatggtctag

SEQ ID NO: 20409 - RNA, 22 nt, synthetic construct
  source 1..22: mol_type = other RNA
cacttctcttcattttcaatga

SEQ ID NO: 20410 - RNA, 22 nt, synthetic construct
  source 1..22: mol_type = other RNA
cagaaacagtactttccaaaat

SEQ ID NO: 20411 - RNA, 22 nt, synthetic construct
  source 1..22: mol_type = other RNA
cagaacatactttccattatga

SEQ ID NO: 20412 - RNA, 22 nt, synthetic construct
  source 1..22: mol_type = other RNA
cagacaaggaggagtagctgcc

SEQ ID NO: 20413 - RNA, 22 nt, synthetic construct
  source 1..22: mol_type = other RNA
cagacaggctgggtttgaattt

SEQ ID NO: 20414 - RNA, 22 nt, synthetic construct
  source 1..22: mol_type = other RNA
cagacccctctctgactttgta

SEQ ID NO: 20415 - RNA, 22 nt, synthetic construct
  source 1..22: mol_type = other RNA
cagagagttccaggcaggatga

SEQ ID NO: 20416 - RNA, 22 nt, synthetic construct
  source 1..22: mol_type = other RNA
cagagcacagattcatcctgcc

SEQ ID NO: 20417 - RNA, 22 nt, synthetic construct
  source 1..22: mol_type = other RNA
cagatatatctctctagaaaca

SEQ ID NO: 20418 - RNA, 22 nt, synthetic construct
  source 1..22: mol_type = other RNA
cagatgcaaagagctctcttag

SEQ ID NO: 20419 - RNA, 22 nt, synthetic construct
  source 1..22: mol_type = other RNA
cagattcatcctgcctggaact

SEQ ID NO: 20420 - RNA, 22 nt, synthetic construct
  source 1..22: mol_type = other RNA
cagattgacactaaatatatgt

SEQ ID NO: 20421 - RNA, 22 nt, synthetic construct
  source 1..22: mol_type = other RNA
cagcaatcacctgtggatgcta

SEQ ID NO: 20422 - RNA, 22 nt, synthetic construct
  source 1..22: mol_type = other RNA
cagcctcccagacaaggaggag

SEQ ID NO: 20423 - RNA, 22 nt, synthetic construct
  source 1..22: mol_type = other RNA
cagcctgtctgatacttgtcct

SEQ ID NO: 20424 - RNA, 22 nt, synthetic construct
  source 1..22: mol_type = other RNA
cagctactcctccttgtctggg

SEQ ID NO: 20425 - RNA, 22 nt, synthetic construct
  source 1..22: mol_type = other RNA
cagctcttgtatgcatttaggt

SEQ ID NO: 20426 - RNA, 22 nt, synthetic construct
  source 1..22: mol_type = other RNA
caggatgaatctgtgctctgat

SEQ ID NO: 20427 - RNA, 22 nt, synthetic construct
  source 1..22: mol_type = other RNA
caggcaggatgaatctgtgctc

SEQ ID NO: 20428 - RNA, 22 nt, synthetic construct
  source 1..22: mol_type = other RNA
caggccaccttgaccagatata

SEQ ID NO: 20429 - RNA, 22 nt, synthetic construct
  source 1..22: mol_type = other RNA
caggctgggtttgaatttgggc

SEQ ID NO: 20430 - RNA, 22 nt, synthetic construct
  source 1..22: mol_type = other RNA
cagggataggtgaggactatgg

SEQ ID NO: 20431 - RNA, 22 nt, synthetic construct
  source 1..22: mol_type = other RNA
cagggatcagagcacagattca

SEQ ID NO: 20432 - RNA, 22 nt, synthetic construct
  source 1..22: mol_type = other RNA
cagggtacatgatcactaaaag

SEQ ID NO: 20433 - RNA, 22 nt, synthetic construct
  source 1..22: mol_type = other RNA
caggtcttcattagattcccca

SEQ ID NO: 20434 - RNA, 22 nt, synthetic construct
  source 1..22: mol_type = other RNA
caggtgattgctgtaaactagc

SEQ ID NO: 20435 - RNA, 22 nt, synthetic construct
  source 1..22: mol_type = other RNA
caggttgggaatatattgccta

SEQ ID NO: 20436 - RNA, 22 nt, synthetic construct
  source 1..22: mol_type = other RNA
cagtaaaacaaaaacaaaaccc

SEQ ID NO: 20437 - RNA, 22 nt, synthetic construct
  source 1..22: mol_type = other RNA
cagtaactggttgagcccaaat

SEQ ID NO: 20438 - RNA, 22 nt, synthetic construct
  source 1..22: mol_type = other RNA
cagtactttccaaaatgagagg

SEQ ID NO: 20439 - RNA, 22 nt, synthetic construct
  source 1..22: mol_type = other RNA
cagtgatgctctcacaaaatct

SEQ ID NO: 20440 - RNA, 22 nt, synthetic construct
  source 1..22: mol_type = other RNA
cagtgggatttgcgttttaatt

SEQ ID NO: 20441 - RNA, 22 nt, synthetic construct
  source 1..22: mol_type = other RNA
cagttaagttttggaagcttaa

SEQ ID NO: 20442 - RNA, 22 nt, synthetic construct
  source 1..22: mol_type = other RNA
cagttactggctttatgacttt

SEQ ID NO: 20443 - RNA, 22 nt, synthetic construct
  source 1..22: mol_type = other RNA
cataaagccagtaactggttga

SEQ ID NO: 20444 - RNA, 22 nt, synthetic construct
  source 1..22: mol_type = other RNA
cataacattaaaagctaagaga

SEQ ID NO: 20445 - RNA, 22 nt, synthetic construct
  source 1..22: mol_type = other RNA
cataatggaaagtatgttctgt

SEQ ID NO: 20446 - RNA, 22 nt, synthetic construct
  source 1..22: mol_type = other RNA
catacaagagctggcaaatacc

SEQ ID NO: 20447 - RNA, 22 nt, synthetic construct
  source 1..22: mol_type = other RNA
catactttccattatgatcaaa

SEQ ID NO: 20448 - RNA, 22 nt, synthetic construct
  source 1..22: mol_type = other RNA
catagtcctcacctatccctgt

SEQ ID NO: 20449 - RNA, 22 nt, synthetic construct
  source 1..22: mol_type = other RNA
catatatttagtgtcaatctgt

SEQ ID NO: 20450 - RNA, 22 nt, synthetic construct
  source 1..22: mol_type = other RNA
catattaaatgcctcagggatc

SEQ ID NO: 20451 - RNA, 22 nt, synthetic construct
  source 1..22: mol_type = other RNA
catcaagaggtggattggggaa

SEQ ID NO: 20452 - RNA, 22 nt, synthetic construct
  source 1..22: mol_type = other RNA
catcactgtaatcttttctaag

SEQ ID NO: 20453 - RNA, 22 nt, synthetic construct
  source 1..22: mol_type = other RNA
catccacaggtgattgctgtaa

SEQ ID NO: 20454 - RNA, 22 nt, synthetic construct
  source 1..22: mol_type = other RNA
catccatggggaagtgggaaga

SEQ ID NO: 20455 - RNA, 22 nt, synthetic construct
  source 1..22: mol_type = other RNA
catcctgcctggaactctctgt

SEQ ID NO: 20456 - RNA, 22 nt, synthetic construct
  source 1..22: mol_type = other RNA
catctgagcttctaataataag

SEQ ID NO: 20457 - RNA, 22 nt, synthetic construct
  source 1..22: mol_type = other RNA
catgaaattaggtacaaagtca

SEQ ID NO: 20458 - RNA, 22 nt, synthetic construct
  source 1..22: mol_type = other RNA
catgactagaccatccatgggg

SEQ ID NO: 20459 - RNA, 22 nt, synthetic construct
  source 1..22: mol_type = other RNA
catgagctaaaaaacaaagaaa

SEQ ID NO: 20460 - RNA, 22 nt, synthetic construct
  source 1..22: mol_type = other RNA
catgatcactaaaaggcagcta

SEQ ID NO: 20461 - RNA, 22 nt, synthetic construct
  source 1..22: mol_type = other RNA
catgcattactccatttgatca

SEQ ID NO: 20462 - RNA, 22 nt, synthetic construct
  source 1..22: mol_type = other RNA
catgcctctcattttggaaagt

SEQ ID NO: 20463 - RNA, 22 nt, synthetic construct
  source 1..22: mol_type = other RNA
catggatggtctagtcatgcct

SEQ ID NO: 20464 - RNA, 22 nt, synthetic construct
  source 1..22: mol_type = other RNA
catggggaagtgggaagaaaat

SEQ ID NO: 20465 - RNA, 22 nt, synthetic construct
  source 1..22: mol_type = other RNA
catgtaccctgaatataagtgt

SEQ ID NO: 20466 - RNA, 22 nt, synthetic construct
  source 1..22: mol_type = other RNA
catgtgacagtgggatttgcgt

SEQ ID NO: 20467 - RNA, 22 nt, synthetic construct
  source 1..22: mol_type = other RNA
cattaaaagctaagagagctct

SEQ ID NO: 20468 - RNA, 22 nt, synthetic construct
  source 1..22: mol_type = other RNA
cattaaggaaaggctactagcc

SEQ ID NO: 20469 - RNA, 22 nt, synthetic construct
  source 1..22: mol_type = other RNA
cattactccatttgatcataat

SEQ ID NO: 20470 - RNA, 22 nt, synthetic construct
  source 1..22: mol_type = other RNA
cattagattccccaatccacct

SEQ ID NO: 20471 - RNA, 22 nt, synthetic construct
  source 1..22: mol_type = other RNA
cattaggcaatatattcccaac

SEQ ID NO: 20472 - RNA, 22 nt, synthetic construct
  source 1..22: mol_type = other RNA
cattatgatcaaatggagtaat

SEQ ID NO: 20473 - RNA, 22 nt, synthetic construct
  source 1..22: mol_type = other RNA
cattgaaaatgaagagaagtgt

SEQ ID NO: 20474 - RNA, 22 nt, synthetic construct
  source 1..22: mol_type = other RNA
catttaaggtatttgccagctc

SEQ ID NO: 20475 - RNA, 22 nt, synthetic construct
  source 1..22: mol_type = other RNA
catttaggttttgtttctttgt

SEQ ID NO: 20476 - RNA, 22 nt, synthetic construct
  source 1..22: mol_type = other RNA
catttgatcataatggaaagta

SEQ ID NO: 20477 - RNA, 22 nt, synthetic construct
  source 1..22: mol_type = other RNA
catttgccatagtcctcaccta

SEQ ID NO: 20478 - RNA, 22 nt, synthetic construct
  source 1..22: mol_type = other RNA
cattttggaaagtactgtttct

SEQ ID NO: 20479 - RNA, 22 nt, synthetic construct
  source 1..22: mol_type = other RNA
ccaaaagtcataaagccagtaa

SEQ ID NO: 20480 - RNA, 22 nt, synthetic construct
  source 1..22: mol_type = other RNA
ccaaaatgagaggcatgactag

SEQ ID NO: 20481 - RNA, 22 nt, synthetic construct
  source 1..22: mol_type = other RNA
ccaaattcaaacccagcctgtc

SEQ ID NO: 20482 - RNA, 22 nt, synthetic construct
  source 1..22: mol_type = other RNA
ccaacctggctagtttacagca

SEQ ID NO: 20483 - RNA, 22 nt, synthetic construct
  source 1..22: mol_type = other RNA
ccaactcaaccatttaaggtat

SEQ ID NO: 20484 - RNA, 22 nt, synthetic construct
  source 1..22: mol_type = other RNA
ccaatccacctcttgatggggc

SEQ ID NO: 20485 - RNA, 22 nt, synthetic construct
  source 1..22: mol_type = other RNA
ccacagcctcccagacaaggag

SEQ ID NO: 20486 - RNA, 22 nt, synthetic construct
  source 1..22: mol_type = other RNA
ccacaggtgattgctgtaaact

SEQ ID NO: 20487 - RNA, 22 nt, synthetic construct
  source 1..22: mol_type = other RNA
ccacagtaaaacaaaaacaaaa

SEQ ID NO: 20488 - RNA, 22 nt, synthetic construct
  source 1..22: mol_type = other RNA
ccacctcttgatggggctagta

SEQ ID NO: 20489 - RNA, 22 nt, synthetic construct
  source 1..22: mol_type = other RNA
ccaccttgaccagatatatctc

SEQ ID NO: 20490 - RNA, 22 nt, synthetic construct
  source 1..22: mol_type = other RNA
ccactgtcacatgcattactcc

SEQ ID NO: 20491 - RNA, 22 nt, synthetic construct
  source 1..22: mol_type = other RNA
ccacttccccatggatggtcta

SEQ ID NO: 20492 - RNA, 22 nt, synthetic construct
  source 1..22: mol_type = other RNA
ccagacaaggaggagtagctgc

SEQ ID NO: 20493 - RNA, 22 nt, synthetic construct
  source 1..22: mol_type = other RNA
ccagacccctctctgactttgt

SEQ ID NO: 20494 - RNA, 22 nt, synthetic construct
  source 1..22: mol_type = other RNA
ccagatatatctctctagaaac

SEQ ID NO: 20495 - RNA, 22 nt, synthetic construct
  source 1..22: mol_type = other RNA
ccagcctgtctgatacttgtcc

SEQ ID NO: 20496 - RNA, 22 nt, synthetic construct
  source 1..22: mol_type = other RNA
ccagctcttgtatgcatttagg

SEQ ID NO: 20497 - RNA, 22 nt, synthetic construct
  source 1..22: mol_type = other RNA
ccaggcaggatgaatctgtgct

SEQ ID NO: 20498 - RNA, 22 nt, synthetic construct
  source 1..22: mol_type = other RNA
ccaggccaccttgaccagatat

SEQ ID NO: 20499 - RNA, 22 nt, synthetic construct
  source 1..22: mol_type = other RNA
ccaggttgggaatatattgcct

SEQ ID NO: 20500 - RNA, 22 nt, synthetic construct
  source 1..22: mol_type = other RNA
ccagtaactggttgagcccaaa

SEQ ID NO: 20501 - RNA, 22 nt, synthetic construct
  source 1..22: mol_type = other RNA
ccagttactggctttatgactt

SEQ ID NO: 20502 - RNA, 22 nt, synthetic construct
  source 1..22: mol_type = other RNA
ccatagtcctcacctatccctg

SEQ ID NO: 20503 - RNA, 22 nt, synthetic construct
  source 1..22: mol_type = other RNA
ccatcaagaggtggattgggga

SEQ ID NO: 20504 - RNA, 22 nt, synthetic construct
  source 1..22: mol_type = other RNA
ccatccatggggaagtgggaag

SEQ ID NO: 20505 - RNA, 22 nt, synthetic construct
  source 1..22: mol_type = other RNA
ccatggatggtctagtcatgcc

SEQ ID NO: 20506 - RNA, 22 nt, synthetic construct
  source 1..22: mol_type = other RNA
ccatggggaagtgggaagaaaa

SEQ ID NO: 20507 - RNA, 22 nt, synthetic construct
  source 1..22: mol_type = other RNA
ccattatgatcaaatggagtaa

SEQ ID NO: 20508 - RNA, 22 nt, synthetic construct
  source 1..22: mol_type = other RNA
ccatttaaggtatttgccagct

SEQ ID NO: 20509 - RNA, 22 nt, synthetic construct
  source 1..22: mol_type = other RNA
ccatttgatcataatggaaagt

SEQ ID NO: 20510 - RNA, 22 nt, synthetic construct
  source 1..22: mol_type = other RNA
ccatttgccatagtcctcacct

SEQ ID NO: 20511 - RNA, 22 nt, synthetic construct
  source 1..22: mol_type = other RNA
cccaaattcaaacccagcctgt

SEQ ID NO: 20512 - RNA, 22 nt, synthetic construct
  source 1..22: mol_type = other RNA
cccaacctggctagtttacagc

SEQ ID NO: 20513 - RNA, 22 nt, synthetic construct
  source 1..22: mol_type = other RNA
cccaatccacctcttgatgggg

SEQ ID NO: 20514 - RNA, 22 nt, synthetic construct
  source 1..22: mol_type = other RNA
cccacagcctcccagacaagga

SEQ ID NO: 20515 - RNA, 22 nt, synthetic construct
  source 1..22: mol_type = other RNA
cccacagtaaaacaaaaacaaa

SEQ ID NO: 20516 - RNA, 22 nt, synthetic construct
  source 1..22: mol_type = other RNA
cccactgtcacatgcattactc

SEQ ID NO: 20517 - RNA, 22 nt, synthetic construct
  source 1..22: mol_type = other RNA
cccacttccccatggatggtct

SEQ ID NO: 20518 - RNA, 22 nt, synthetic construct
  source 1..22: mol_type = other RNA
cccagacaaggaggagtagctg

SEQ ID NO: 20519 - RNA, 22 nt, synthetic construct
  source 1..22: mol_type = other RNA
cccagcctgtctgatacttgtc

SEQ ID NO: 20520 - RNA, 22 nt, synthetic construct
  source 1..22: mol_type = other RNA
cccatcaagaggtggattgggg

SEQ ID NO: 20521 - RNA, 22 nt, synthetic construct
  source 1..22: mol_type = other RNA
cccatggatggtctagtcatgc

SEQ ID NO: 20522 - RNA, 22 nt, synthetic construct
  source 1..22: mol_type = other RNA
cccatttgccatagtcctcacc

SEQ ID NO: 20523 - RNA, 22 nt, synthetic construct
  source 1..22: mol_type = other RNA
ccccaatccacctcttgatggg

SEQ ID NO: 20524 - RNA, 22 nt, synthetic construct
  source 1..22: mol_type = other RNA
ccccacagcctcccagacaagg

SEQ ID NO: 20525 - RNA, 22 nt, synthetic construct
  source 1..22: mol_type = other RNA
ccccatcaagaggtggattggg

SEQ ID NO: 20526 - RNA, 22 nt, synthetic construct
  source 1..22: mol_type = other RNA
ccccatggatggtctagtcatg

SEQ ID NO: 20527 - RNA, 22 nt, synthetic construct
  source 1..22: mol_type = other RNA
cccctctctgactttgtaccta

SEQ ID NO: 20528 - RNA, 22 nt, synthetic construct
  source 1..22: mol_type = other RNA
cccgataaaatacaacagggat

SEQ ID NO: 20529 - RNA, 22 nt, synthetic construct
  source 1..22: mol_type = other RNA
ccctatcattaaggaaaggcta

SEQ ID NO: 20530 - RNA, 22 nt, synthetic construct
  source 1..22: mol_type = other RNA
ccctcaaacagagagttccagg

SEQ ID NO: 20531 - RNA, 22 nt, synthetic construct
  source 1..22: mol_type = other RNA
ccctctctgactttgtacctaa

SEQ ID NO: 20532 - RNA, 22 nt, synthetic construct
  source 1..22: mol_type = other RNA
ccctgaatataagtgtatttaa

SEQ ID NO: 20533 - RNA, 22 nt, synthetic construct
  source 1..22: mol_type = other RNA
ccctgaggcatttaatatgttc

SEQ ID NO: 20534 - RNA, 22 nt, synthetic construct
  source 1..22: mol_type = other RNA
ccctgttgtattttatcgggtc

SEQ ID NO: 20535 - RNA, 22 nt, synthetic construct
  source 1..22: mol_type = other RNA
ccgataaaatacaacagggata

SEQ ID NO: 20536 - RNA, 22 nt, synthetic construct
  source 1..22: mol_type = other RNA
ccgccttccctcaaacagagag

SEQ ID NO: 20537 - RNA, 22 nt, synthetic construct
  source 1..22: mol_type = other RNA
cctaaatgcatacaagagctgg

SEQ ID NO: 20538 - RNA, 22 nt, synthetic construct
  source 1..22: mol_type = other RNA
cctaatgtttcagaaacagtac

SEQ ID NO: 20539 - RNA, 22 nt, synthetic construct
  source 1..22: mol_type = other RNA
cctaatttcatgagctaaaaaa

SEQ ID NO: 20540 - RNA, 22 nt, synthetic construct
  source 1..22: mol_type = other RNA
cctatcattaaggaaaggctac

SEQ ID NO: 20541 - RNA, 22 nt, synthetic construct
  source 1..22: mol_type = other RNA
cctatccctgttgtattttatc

SEQ ID NO: 20542 - RNA, 22 nt, synthetic construct
  source 1..22: mol_type = other RNA
cctcaaacagagagttccaggc

SEQ ID NO: 20543 - RNA, 22 nt, synthetic construct
  source 1..22: mol_type = other RNA
cctcacctatccctgttgtatt

SEQ ID NO: 20544 - RNA, 22 nt, synthetic construct
  source 1..22: mol_type = other RNA
cctcagggatcagagcacagat

SEQ ID NO: 20545 - RNA, 22 nt, synthetic construct
  source 1..22: mol_type = other RNA
cctcccagacaaggaggagtag

SEQ ID NO: 20546 - RNA, 22 nt, synthetic construct
  source 1..22: mol_type = other RNA
cctccttctccccacagcctcc

SEQ ID NO: 20547 - RNA, 22 nt, synthetic construct
  source 1..22: mol_type = other RNA
cctccttgtctgggaggctgtg

SEQ ID NO: 20548 - RNA, 22 nt, synthetic construct
  source 1..22: mol_type = other RNA
cctctcattttggaaagtactg

SEQ ID NO: 20549 - RNA, 22 nt, synthetic construct
  source 1..22: mol_type = other RNA
cctctctgactttgtacctaat

SEQ ID NO: 20550 - RNA, 22 nt, synthetic construct
  source 1..22: mol_type = other RNA
cctcttcttagaaaagattaca

SEQ ID NO: 20551 - RNA, 22 nt, synthetic construct
  source 1..22: mol_type = other RNA
cctcttgatggggctagtagcc

SEQ ID NO: 20552 - RNA, 22 nt, synthetic construct
  source 1..22: mol_type = other RNA
cctgaggcatttaatatgttct

SEQ ID NO: 20553 - RNA, 22 nt, synthetic construct
  source 1..22: mol_type = other RNA
cctgcctggaactctctgtttg

SEQ ID NO: 20554 - RNA, 22 nt, synthetic construct
  source 1..22: mol_type = other RNA
cctggaactctctgtttgaggg

SEQ ID NO: 20555 - RNA, 22 nt, synthetic construct
  source 1..22: mol_type = other RNA
cctggctagtttacagcaatca

SEQ ID NO: 20556 - RNA, 22 nt, synthetic construct
  source 1..22: mol_type = other RNA
cctggtactcctccttctcccc

SEQ ID NO: 20557 - RNA, 22 nt, synthetic construct
  source 1..22: mol_type = other RNA
cctgtctgatacttgtcctctt

SEQ ID NO: 20558 - RNA, 22 nt, synthetic construct
  source 1..22: mol_type = other RNA
cctgtggatgctaattaaaacg

SEQ ID NO: 20559 - RNA, 22 nt, synthetic construct
  source 1..22: mol_type = other RNA
cctgtgtgtgggttttgttttt

SEQ ID NO: 20560 - RNA, 22 nt, synthetic construct
  source 1..22: mol_type = other RNA
cctgttgtattttatcgggtcc

SEQ ID NO: 20561 - RNA, 22 nt, synthetic construct
  source 1..22: mol_type = other RNA
ccttaaatggttgagttggacc

SEQ ID NO: 20562 - RNA, 22 nt, synthetic construct
  source 1..22: mol_type = other RNA
ccttaatgatagggtgtttcta

SEQ ID NO: 20563 - RNA, 22 nt, synthetic construct
  source 1..22: mol_type = other RNA
ccttccctcaaacagagagttc

SEQ ID NO: 20564 - RNA, 22 nt, synthetic construct
  source 1..22: mol_type = other RNA
ccttctccccacagcctcccag

SEQ ID NO: 20565 - RNA, 22 nt, synthetic construct
  source 1..22: mol_type = other RNA
ccttgaccagatatatctctct

SEQ ID NO: 20566 - RNA, 22 nt, synthetic construct
  source 1..22: mol_type = other RNA
ccttgtctgggaggctgtgggg

SEQ ID NO: 20567 - RNA, 22 nt, synthetic construct
  source 1..22: mol_type = other RNA
cctttccttaatgatagggtgt

SEQ ID NO: 20568 - RNA, 22 nt, synthetic construct
  source 1..22: mol_type = other RNA
ccttttagtgatcatgtaccct

SEQ ID NO: 20569 - RNA, 22 nt, synthetic construct
  source 1..22: mol_type = other RNA
cgataaaatacaacagggatag

SEQ ID NO: 20570 - RNA, 22 nt, synthetic construct
  source 1..22: mol_type = other RNA
cgcaaatcccactgtcacatgc

SEQ ID NO: 20571 - RNA, 22 nt, synthetic construct
  source 1..22: mol_type = other RNA
cgccttccctcaaacagagagt

SEQ ID NO: 20572 - RNA, 22 nt, synthetic construct
  source 1..22: mol_type = other RNA
cggcaagattttgtgagagcat

SEQ ID NO: 20573 - RNA, 22 nt, synthetic construct
  source 1..22: mol_type = other RNA
cgggtccaactcaaccatttaa

SEQ ID NO: 20574 - RNA, 22 nt, synthetic construct
  source 1..22: mol_type = other RNA
cgttttaattagcatccacagg

SEQ ID NO: 20575 - RNA, 22 nt, synthetic construct
  source 1..22: mol_type = other RNA
ctaaaaggcagctactcctcct

SEQ ID NO: 20576 - RNA, 22 nt, synthetic construct
  source 1..22: mol_type = other RNA
ctaaatatacagattgacacta

SEQ ID NO: 20577 - RNA, 22 nt, synthetic construct
  source 1..22: mol_type = other RNA
ctaaatgcatacaagagctggc

SEQ ID NO: 20578 - RNA, 22 nt, synthetic construct
  source 1..22: mol_type = other RNA
ctaacacttctcttcattttca

SEQ ID NO: 20579 - RNA, 22 nt, synthetic construct
  source 1..22: mol_type = other RNA
ctaagaagaggacaagtatcag

SEQ ID NO: 20580 - RNA, 22 nt, synthetic construct
  source 1..22: mol_type = other RNA
ctaagagagctctttgcatctg

SEQ ID NO: 20581 - RNA, 22 nt, synthetic construct
  source 1..22: mol_type = other RNA
ctaatgtttcagaaacagtact

SEQ ID NO: 20582 - RNA, 22 nt, synthetic construct
  source 1..22: mol_type = other RNA
ctaattaaaacgcaaatcccac

SEQ ID NO: 20583 - RNA, 22 nt, synthetic construct
  source 1..22: mol_type = other RNA
ctaatttcatgagctaaaaaac

SEQ ID NO: 20584 - RNA, 22 nt, synthetic construct
  source 1..22: mol_type = other RNA
ctactaaatatacagattgaca

SEQ ID NO: 20585 - RNA, 22 nt, synthetic construct
  source 1..22: mol_type = other RNA
ctactagccccatcaagaggtg

SEQ ID NO: 20586 - RNA, 22 nt, synthetic construct
  source 1..22: mol_type = other RNA
ctactcctccttgtctgggagg

SEQ ID NO: 20587 - RNA, 22 nt, synthetic construct
  source 1..22: mol_type = other RNA
ctagaaacaccctatcattaag

SEQ ID NO: 20588 - RNA, 22 nt, synthetic construct
  source 1..22: mol_type = other RNA
ctagaccatccatggggaagtg

SEQ ID NO: 20589 - RNA, 22 nt, synthetic construct
  source 1..22: mol_type = other RNA
ctagagagatatatctggtcaa

SEQ ID NO: 20590 - RNA, 22 nt, synthetic construct
  source 1..22: mol_type = other RNA
ctagccaggttgggaatatatt

SEQ ID NO: 20591 - RNA, 22 nt, synthetic construct
  source 1..22: mol_type = other RNA
ctagccccatcaagaggtggat

SEQ ID NO: 20592 - RNA, 22 nt, synthetic construct
  source 1..22: mol_type = other RNA
ctagtagcctttccttaatgat

SEQ ID NO: 20593 - RNA, 22 nt, synthetic construct
  source 1..22: mol_type = other RNA
ctagtcatgcctctcattttgg

SEQ ID NO: 20594 - RNA, 22 nt, synthetic construct
  source 1..22: mol_type = other RNA
ctagtttacagcaatcacctgt

SEQ ID NO: 20595 - RNA, 22 nt, synthetic construct
  source 1..22: mol_type = other RNA
ctatcattaaggaaaggctact

SEQ ID NO: 20596 - RNA, 22 nt, synthetic construct
  source 1..22: mol_type = other RNA
ctatccctgttgtattttatcg

SEQ ID NO: 20597 - RNA, 22 nt, synthetic construct
  source 1..22: mol_type = other RNA
ctatggcaaatgggacagaaca

SEQ ID NO: 20598 - RNA, 22 nt, synthetic construct
  source 1..22: mol_type = other RNA
ctcaaacagagagttccaggca

SEQ ID NO: 20599 - RNA, 22 nt, synthetic construct
  source 1..22: mol_type = other RNA
ctcaaccagttactggctttat

SEQ ID NO: 20600 - RNA, 22 nt, synthetic construct
  source 1..22: mol_type = other RNA
ctcaaccatttaaggtatttgc

SEQ ID NO: 20601 - RNA, 22 nt, synthetic construct
  source 1..22: mol_type = other RNA
ctcacaaaatcttgccgccttc

SEQ ID NO: 20602 - RNA, 22 nt, synthetic construct
  source 1..22: mol_type = other RNA
ctcacctatccctgttgtattt

SEQ ID NO: 20603 - RNA, 22 nt, synthetic construct
  source 1..22: mol_type = other RNA
ctcagatgcaaagagctctctt

SEQ ID NO: 20604 - RNA, 22 nt, synthetic construct
  source 1..22: mol_type = other RNA
ctcagggatcagagcacagatt

SEQ ID NO: 20605 - RNA, 22 nt, synthetic construct
  source 1..22: mol_type = other RNA
ctcatgaaattaggtacaaagt

SEQ ID NO: 20606 - RNA, 22 nt, synthetic construct
  source 1..22: mol_type = other RNA
ctcattttggaaagtactgttt

SEQ ID NO: 20607 - RNA, 22 nt, synthetic construct
  source 1..22: mol_type = other RNA
ctccaaaagtcataaagccagt

SEQ ID NO: 20608 - RNA, 22 nt, synthetic construct
  source 1..22: mol_type = other RNA
ctccatttgatcataatggaaa

SEQ ID NO: 20609 - RNA, 22 nt, synthetic construct
  source 1..22: mol_type = other RNA
ctcccagacaaggaggagtagc

SEQ ID NO: 20610 - RNA, 22 nt, synthetic construct
  source 1..22: mol_type = other RNA
ctccccacagcctcccagacaa

SEQ ID NO: 20611 - RNA, 22 nt, synthetic construct
  source 1..22: mol_type = other RNA
ctcctccttctccccacagcct

SEQ ID NO: 20612 - RNA, 22 nt, synthetic construct
  source 1..22: mol_type = other RNA
ctcctccttgtctgggaggctg

SEQ ID NO: 20613 - RNA, 22 nt, synthetic construct
  source 1..22: mol_type = other RNA
ctccttctccccacagcctccc

SEQ ID NO: 20614 - RNA, 22 nt, synthetic construct
  source 1..22: mol_type = other RNA
ctccttgtctgggaggctgtgg

SEQ ID NO: 20615 - RNA, 22 nt, synthetic construct
  source 1..22: mol_type = other RNA
ctctagaaacaccctatcatta

SEQ ID NO: 20616 - RNA, 22 nt, synthetic construct
  source 1..22: mol_type = other RNA
ctctcacaaaatcttgccgcct

SEQ ID NO: 20617 - RNA, 22 nt, synthetic construct
  source 1..22: mol_type = other RNA
ctctcattttggaaagtactgt

SEQ ID NO: 20618 - RNA, 22 nt, synthetic construct
  source 1..22: mol_type = other RNA
ctctccaaaagtcataaagcca

SEQ ID NO: 20619 - RNA, 22 nt, synthetic construct
  source 1..22: mol_type = other RNA
ctctctagaaacaccctatcat

SEQ ID NO: 20620 - RNA, 22 nt, synthetic construct
  source 1..22: mol_type = other RNA
ctctctgactttgtacctaatt

SEQ ID NO: 20621 - RNA, 22 nt, synthetic construct
  source 1..22: mol_type = other RNA
ctctctgtttgagggaaggcgg

SEQ ID NO: 20622 - RNA, 22 nt, synthetic construct
  source 1..22: mol_type = other RNA
ctctcttagcttttaatgttat

SEQ ID NO: 20623 - RNA, 22 nt, synthetic construct
  source 1..22: mol_type = other RNA
ctctgactttgtacctaatttc

SEQ ID NO: 20624 - RNA, 22 nt, synthetic construct
  source 1..22: mol_type = other RNA
ctctgatccctgaggcatttaa

SEQ ID NO: 20625 - RNA, 22 nt, synthetic construct
  source 1..22: mol_type = other RNA
ctctgtttgagggaaggcggca

SEQ ID NO: 20626 - RNA, 22 nt, synthetic construct
  source 1..22: mol_type = other RNA
ctcttagcttttaatgttatga

SEQ ID NO: 20627 - RNA, 22 nt, synthetic construct
  source 1..22: mol_type = other RNA
ctcttcttagaaaagattacag

SEQ ID NO: 20628 - RNA, 22 nt, synthetic construct
  source 1..22: mol_type = other RNA
ctcttgatggggctagtagcct

SEQ ID NO: 20629 - RNA, 22 nt, synthetic construct
  source 1..22: mol_type = other RNA
ctcttgtatgcatttaggtttt

SEQ ID NO: 20630 - RNA, 22 nt, synthetic construct
  source 1..22: mol_type = other RNA
ctctttgcatctgagcttctaa

SEQ ID NO: 20631 - RNA, 22 nt, synthetic construct
  source 1..22: mol_type = other RNA
ctgaaaaattaatttatgccca

SEQ ID NO: 20632 - RNA, 22 nt, synthetic construct
  source 1..22: mol_type = other RNA
ctgaaacattaggcaatatatt

SEQ ID NO: 20633 - RNA, 22 nt, synthetic construct
  source 1..22: mol_type = other RNA
ctgacctgtgtgtgggttttgt

SEQ ID NO: 20634 - RNA, 22 nt, synthetic construct
  source 1..22: mol_type = other RNA
ctgactttgtacctaatttcat

SEQ ID NO: 20635 - RNA, 22 nt, synthetic construct
  source 1..22: mol_type = other RNA
ctgagcttctaataataagaac

SEQ ID NO: 20636 - RNA, 22 nt, synthetic construct
  source 1..22: mol_type = other RNA
ctgaggcatttaatatgttctt

SEQ ID NO: 20637 - RNA, 22 nt, synthetic construct
  source 1..22: mol_type = other RNA
ctgatacttgtcctcttcttag

SEQ ID NO: 20638 - RNA, 22 nt, synthetic construct
  source 1..22: mol_type = other RNA
ctgatccctgaggcatttaata

SEQ ID NO: 20639 - RNA, 22 nt, synthetic construct
  source 1..22: mol_type = other RNA
ctgcctggaactctctgtttga

SEQ ID NO: 20640 - RNA, 22 nt, synthetic construct
  source 1..22: mol_type = other RNA
ctgccttttagtgatcatgtac

SEQ ID NO: 20641 - RNA, 22 nt, synthetic construct
  source 1..22: mol_type = other RNA
ctggaactctctgtttgaggga

SEQ ID NO: 20642 - RNA, 22 nt, synthetic construct
  source 1..22: mol_type = other RNA
ctggcaaataccttaaatggtt

SEQ ID NO: 20643 - RNA, 22 nt, synthetic construct
  source 1..22: mol_type = other RNA
ctggctagtttacagcaatcac

SEQ ID NO: 20644 - RNA, 22 nt, synthetic construct
  source 1..22: mol_type = other RNA
ctggctttatgacttttggaga

SEQ ID NO: 20645 - RNA, 22 nt, synthetic construct
  source 1..22: mol_type = other RNA
ctgggaggctgtggggagaagg

SEQ ID NO: 20646 - RNA, 22 nt, synthetic construct
  source 1..22: mol_type = other RNA
ctgggtttgaatttgggctcaa

SEQ ID NO: 20647 - RNA, 22 nt, synthetic construct
  source 1..22: mol_type = other RNA
ctggtactcctccttctcccca

SEQ ID NO: 20648 - RNA, 22 nt, synthetic construct
  source 1..22: mol_type = other RNA
ctggtcaaggtggcctggtact

SEQ ID NO: 20649 - RNA, 22 nt, synthetic construct
  source 1..22: mol_type = other RNA
ctggttgagcccaaattcaaac

SEQ ID NO: 20650 - RNA, 22 nt, synthetic construct
  source 1..22: mol_type = other RNA
ctgtaaactagccaggttggga

SEQ ID NO: 20651 - RNA, 22 nt, synthetic construct
  source 1..22: mol_type = other RNA
ctgtaatcttttctaagaagag

SEQ ID NO: 20652 - RNA, 22 nt, synthetic construct
  source 1..22: mol_type = other RNA
ctgtatatttagtagcactaac

SEQ ID NO: 20653 - RNA, 22 nt, synthetic construct
  source 1..22: mol_type = other RNA
ctgtcacatgcattactccatt

SEQ ID NO: 20654 - RNA, 22 nt, synthetic construct
  source 1..22: mol_type = other RNA
ctgtcccatttgccatagtcct

SEQ ID NO: 20655 - RNA, 22 nt, synthetic construct
  source 1..22: mol_type = other RNA
ctgtctgatacttgtcctcttc

SEQ ID NO: 20656 - RNA, 22 nt, synthetic construct
  source 1..22: mol_type = other RNA
ctgtgctctgatccctgaggca

SEQ ID NO: 20657 - RNA, 22 nt, synthetic construct
  source 1..22: mol_type = other RNA
ctgtggatgctaattaaaacgc

SEQ ID NO: 20658 - RNA, 22 nt, synthetic construct
  source 1..22: mol_type = other RNA
ctgtgggcataaattaattttt

SEQ ID NO: 20659 - RNA, 22 nt, synthetic construct
  source 1..22: mol_type = other RNA
ctgtggggagaaggaggagtac

SEQ ID NO: 20660 - RNA, 22 nt, synthetic construct
  source 1..22: mol_type = other RNA
ctgtgtgtgggttttgtttttg

SEQ ID NO: 20661 - RNA, 22 nt, synthetic construct
  source 1..22: mol_type = other RNA
ctgttgtattttatcgggtcca

SEQ ID NO: 20662 - RNA, 22 nt, synthetic construct
  source 1..22: mol_type = other RNA
ctgtttctgaaacattaggcaa

SEQ ID NO: 20663 - RNA, 22 nt, synthetic construct
  source 1..22: mol_type = other RNA
ctgtttgagggaaggcggcaag

SEQ ID NO: 20664 - RNA, 22 nt, synthetic construct
  source 1..22: mol_type = other RNA
cttaaataactctccaaaagtc

SEQ ID NO: 20665 - RNA, 22 nt, synthetic construct
  source 1..22: mol_type = other RNA
cttaaatggttgagttggaccc

SEQ ID NO: 20666 - RNA, 22 nt, synthetic construct
  source 1..22: mol_type = other RNA
cttaatgatagggtgtttctag

SEQ ID NO: 20667 - RNA, 22 nt, synthetic construct
  source 1..22: mol_type = other RNA
cttagaaaagattacagtgatg

SEQ ID NO: 20668 - RNA, 22 nt, synthetic construct
  source 1..22: mol_type = other RNA
cttatattcagggtacatgatc

SEQ ID NO: 20669 - RNA, 22 nt, synthetic construct
  source 1..22: mol_type = other RNA
cttattattagaagctcagatg

SEQ ID NO: 20670 - RNA, 22 nt, synthetic construct
  source 1..22: mol_type = other RNA
cttcattagattccccaatcca

SEQ ID NO: 20671 - RNA, 22 nt, synthetic construct
  source 1..22: mol_type = other RNA
cttccaaaacttaactgaaaaa

SEQ ID NO: 20672 - RNA, 22 nt, synthetic construct
  source 1..22: mol_type = other RNA
cttcccacttccccatggatgg

SEQ ID NO: 20673 - RNA, 22 nt, synthetic construct
  source 1..22: mol_type = other RNA
cttccccatggatggtctagtc

SEQ ID NO: 20674 - RNA, 22 nt, synthetic construct
  source 1..22: mol_type = other RNA
cttccctcaaacagagagttcc

SEQ ID NO: 20675 - RNA, 22 nt, synthetic construct
  source 1..22: mol_type = other RNA
cttctccccacagcctcccaga

SEQ ID NO: 20676 - RNA, 22 nt, synthetic construct
  source 1..22: mol_type = other RNA
cttctcttcattttcaatgaaa

SEQ ID NO: 20677 - RNA, 22 nt, synthetic construct
  source 1..22: mol_type = other RNA
cttcttagaaaagattacagtg

SEQ ID NO: 20678 - RNA, 22 nt, synthetic construct
  source 1..22: mol_type = other RNA
cttgaccagatatatctctcta

SEQ ID NO: 20679 - RNA, 22 nt, synthetic construct
  source 1..22: mol_type = other RNA
cttgatggggctagtagccttt

SEQ ID NO: 20680 - RNA, 22 nt, synthetic construct
  source 1..22: mol_type = other RNA
cttgccgccttccctcaaacag

SEQ ID NO: 20681 - RNA, 22 nt, synthetic construct
  source 1..22: mol_type = other RNA
cttgtatgcatttaggttttgt

SEQ ID NO: 20682 - RNA, 22 nt, synthetic construct
  source 1..22: mol_type = other RNA
cttgtcctcttcttagaaaaga

SEQ ID NO: 20683 - RNA, 22 nt, synthetic construct
  source 1..22: mol_type = other RNA
cttgtctgggaggctgtgggga

SEQ ID NO: 20684 - RNA, 22 nt, synthetic construct
  source 1..22: mol_type = other RNA
ctttatgacttttggagagtta

SEQ ID NO: 20685 - RNA, 22 nt, synthetic construct
  source 1..22: mol_type = other RNA
ctttccaaaatgagaggcatga

SEQ ID NO: 20686 - RNA, 22 nt, synthetic construct
  source 1..22: mol_type = other RNA
ctttccattatgatcaaatgga

SEQ ID NO: 20687 - RNA, 22 nt, synthetic construct
  source 1..22: mol_type = other RNA
ctttccttaatgatagggtgtt

SEQ ID NO: 20688 - RNA, 22 nt, synthetic construct
  source 1..22: mol_type = other RNA
ctttgcatctgagcttctaata

SEQ ID NO: 20689 - RNA, 22 nt, synthetic construct
  source 1..22: mol_type = other RNA
ctttgtacctaatttcatgagc

SEQ ID NO: 20690 - RNA, 22 nt, synthetic construct
  source 1..22: mol_type = other RNA
ctttgttttttagctcatgaaa

SEQ ID NO: 20691 - RNA, 22 nt, synthetic construct
  source 1..22: mol_type = other RNA
cttttagtgatcatgtaccctg

SEQ ID NO: 20692 - RNA, 22 nt, synthetic construct
  source 1..22: mol_type = other RNA
cttttctaagaagaggacaagt

SEQ ID NO: 20693 - RNA, 22 nt, synthetic construct
  source 1..22: mol_type = other RNA
cttttggagagttatttaagct

SEQ ID NO: 20694 - RNA, 22 nt, synthetic construct
  source 1..22: mol_type = other RNA
gaaaaattaatttatgcccaca

SEQ ID NO: 20695 - RNA, 22 nt, synthetic construct
  source 1..22: mol_type = other RNA
gaaaagattacagtgatgctct

SEQ ID NO: 20696 - RNA, 22 nt, synthetic construct
  source 1..22: mol_type = other RNA
gaaaatgaagagaagtgttagt

SEQ ID NO: 20697 - RNA, 22 nt, synthetic construct
  source 1..22: mol_type = other RNA
gaaacaaaacctaaatgcatac

SEQ ID NO: 20698 - RNA, 22 nt, synthetic construct
  source 1..22: mol_type = other RNA
gaaacaccctatcattaaggaa

SEQ ID NO: 20699 - RNA, 22 nt, synthetic construct
  source 1..22: mol_type = other RNA
gaaacagtactttccaaaatga

SEQ ID NO: 20700 - RNA, 22 nt, synthetic construct
  source 1..22: mol_type = other RNA
gaaacattaggcaatatattcc

SEQ ID NO: 20701 - RNA, 22 nt, synthetic construct
  source 1..22: mol_type = other RNA
gaaaggctactagccccatcaa

SEQ ID NO: 20702 - RNA, 22 nt, synthetic construct
  source 1..22: mol_type = other RNA
gaaagtactgtttctgaaacat

SEQ ID NO: 20703 - RNA, 22 nt, synthetic construct
  source 1..22: mol_type = other RNA
gaaagtatgttctgtcccattt

SEQ ID NO: 20704 - RNA, 22 nt, synthetic construct
  source 1..22: mol_type = other RNA
gaaattaggtacaaagtcagag

SEQ ID NO: 20705 - RNA, 22 nt, synthetic construct
  source 1..22: mol_type = other RNA
gaacatactttccattatgatc

SEQ ID NO: 20706 - RNA, 22 nt, synthetic construct
  source 1..22: mol_type = other RNA
gaacatattaaatgcctcaggg

SEQ ID NO: 20707 - RNA, 22 nt, synthetic construct
  source 1..22: mol_type = other RNA
gaactctctgtttgagggaagg

SEQ ID NO: 20708 - RNA, 22 nt, synthetic construct
  source 1..22: mol_type = other RNA
gaagagaagtgttagtgctact

SEQ ID NO: 20709 - RNA, 22 nt, synthetic construct
  source 1..22: mol_type = other RNA
gaagaggacaagtatcagacag

SEQ ID NO: 20710 - RNA, 22 nt, synthetic construct
  source 1..22: mol_type = other RNA
gaagctcagatgcaaagagctc

SEQ ID NO: 20711 - RNA, 22 nt, synthetic construct
  source 1..22: mol_type = other RNA
gaagcttaaataactctccaaa

SEQ ID NO: 20712 - RNA, 22 nt, synthetic construct
  source 1..22: mol_type = other RNA
gaaggaggagtaccaggccacc

SEQ ID NO: 20713 - RNA, 22 nt, synthetic construct
  source 1..22: mol_type = other RNA
gaaggcggcaagattttgtgag

SEQ ID NO: 20714 - RNA, 22 nt, synthetic construct
  source 1..22: mol_type = other RNA
gaagtgggaagaaaatattata

SEQ ID NO: 20715 - RNA, 22 nt, synthetic construct
  source 1..22: mol_type = other RNA
gaagtgttagtgctactaaata

SEQ ID NO: 20716 - RNA, 22 nt, synthetic construct
  source 1..22: mol_type = other RNA
gaatatattgcctaatgtttca

SEQ ID NO: 20717 - RNA, 22 nt, synthetic construct
  source 1..22: mol_type = other RNA
gaatctaatgaagacctgattt

SEQ ID NO: 20718 - RNA, 22 nt, synthetic construct
  source 1..22: mol_type = other RNA
gaatctgtgctctgatccctga

SEQ ID NO: 20719 - RNA, 22 nt, synthetic construct
  source 1..22: mol_type = other RNA
gaatttgggctcaaccagttac

SEQ ID NO: 20720 - RNA, 22 nt, synthetic construct
  source 1..22: mol_type = other RNA
gacaaggaggagtagctgcctt

SEQ ID NO: 20721 - RNA, 22 nt, synthetic construct
  source 1..22: mol_type = other RNA
gacaagtatcagacaggctggg

SEQ ID NO: 20722 - RNA, 22 nt, synthetic construct
  source 1..22: mol_type = other RNA
gacagaacatactttccattat

SEQ ID NO: 20723 - RNA, 22 nt, synthetic construct
  source 1..22: mol_type = other RNA
gacaggctgggtttgaatttgg

SEQ ID NO: 20724 - RNA, 22 nt, synthetic construct
  source 1..22: mol_type = other RNA
gacagtgggatttgcgttttaa

SEQ ID NO: 20725 - RNA, 22 nt, synthetic construct
  source 1..22: mol_type = other RNA
gaccagatatatctctctagaa

SEQ ID NO: 20726 - RNA, 22 nt, synthetic construct
  source 1..22: mol_type = other RNA
gaccatccatggggaagtggga

SEQ ID NO: 20727 - RNA, 22 nt, synthetic construct
  source 1..22: mol_type = other RNA
gacccctctctgactttgtacc

SEQ ID NO: 20728 - RNA, 22 nt, synthetic construct
  source 1..22: mol_type = other RNA
gacccgataaaatacaacaggg

SEQ ID NO: 20729 - RNA, 22 nt, synthetic construct
  source 1..22: mol_type = other RNA
gacctgtgtgtgggttttgttt

SEQ ID NO: 20730 - RNA, 22 nt, synthetic construct
  source 1..22: mol_type = other RNA
gactagaccatccatggggaag

SEQ ID NO: 20731 - RNA, 22 nt, synthetic construct
  source 1..22: mol_type = other RNA
gactatggcaaatgggacagaa

SEQ ID NO: 20732 - RNA, 22 nt, synthetic construct
  source 1..22: mol_type = other RNA
gactttgtacctaatttcatga

SEQ ID NO: 20733 - RNA, 22 nt, synthetic construct
  source 1..22: mol_type = other RNA
gacttttggagagttatttaag

SEQ ID NO: 20734 - RNA, 22 nt, synthetic construct
  source 1..22: mol_type = other RNA
gagaaggaggagtaccaggcca

SEQ ID NO: 20735 - RNA, 22 nt, synthetic construct
  source 1..22: mol_type = other RNA
gagaagtgttagtgctactaaa

SEQ ID NO: 20736 - RNA, 22 nt, synthetic construct
  source 1..22: mol_type = other RNA
gagagatatatctggtcaaggt

SEQ ID NO: 20737 - RNA, 22 nt, synthetic construct
  source 1..22: mol_type = other RNA
gagagcatcactgtaatctttt

SEQ ID NO: 20738 - RNA, 22 nt, synthetic construct
  source 1..22: mol_type = other RNA
gagagctctttgcatctgagct

SEQ ID NO: 20739 - RNA, 22 nt, synthetic construct
  source 1..22: mol_type = other RNA
gagaggcatgactagaccatcc

SEQ ID NO: 20740 - RNA, 22 nt, synthetic construct
  source 1..22: mol_type = other RNA
gagagttatttaagcttccaaa

SEQ ID NO: 20741 - RNA, 22 nt, synthetic construct
  source 1..22: mol_type = other RNA
gagagttccaggcaggatgaat

SEQ ID NO: 20742 - RNA, 22 nt, synthetic construct
  source 1..22: mol_type = other RNA
gagatatatctggtcaaggtgg

SEQ ID NO: 20743 - RNA, 22 nt, synthetic construct
  source 1..22: mol_type = other RNA
gagcacagattcatcctgcctg

SEQ ID NO: 20744 - RNA, 22 nt, synthetic construct
  source 1..22: mol_type = other RNA
gagcatcactgtaatcttttct

SEQ ID NO: 20745 - RNA, 22 nt, synthetic construct
  source 1..22: mol_type = other RNA
gagcccaaattcaaacccagcc

SEQ ID NO: 20746 - RNA, 22 nt, synthetic construct
  source 1..22: mol_type = other RNA
gagctaaaaaacaaagaaacaa

SEQ ID NO: 20747 - RNA, 22 nt, synthetic construct
  source 1..22: mol_type = other RNA
gagctctcttagcttttaatgt

SEQ ID NO: 20748 - RNA, 22 nt, synthetic construct
  source 1..22: mol_type = other RNA
gagctctttgcatctgagcttc

SEQ ID NO: 20749 - RNA, 22 nt, synthetic construct
  source 1..22: mol_type = other RNA
gagctggcaaataccttaaatg

SEQ ID NO: 20750 - RNA, 22 nt, synthetic construct
  source 1..22: mol_type = other RNA
gagcttctaataataagaacat

SEQ ID NO: 20751 - RNA, 22 nt, synthetic construct
  source 1..22: mol_type = other RNA
gaggacaagtatcagacaggct

SEQ ID NO: 20752 - RNA, 22 nt, synthetic construct
  source 1..22: mol_type = other RNA
gaggactatggcaaatgggaca

SEQ ID NO: 20753 - RNA, 22 nt, synthetic construct
  source 1..22: mol_type = other RNA
gaggagtaccaggccaccttga

SEQ ID NO: 20754 - RNA, 22 nt, synthetic construct
  source 1..22: mol_type = other RNA
gaggagtagctgccttttagtg

SEQ ID NO: 20755 - RNA, 22 nt, synthetic construct
  source 1..22: mol_type = other RNA
gaggcatgactagaccatccat

SEQ ID NO: 20756 - RNA, 22 nt, synthetic construct
  source 1..22: mol_type = other RNA
gaggcatttaatatgttcttat

SEQ ID NO: 20757 - RNA, 22 nt, synthetic construct
  source 1..22: mol_type = other RNA
gaggctgtggggagaaggagga

SEQ ID NO: 20758 - RNA, 22 nt, synthetic construct
  source 1..22: mol_type = other RNA
gagggaaggcggcaagattttg

SEQ ID NO: 20759 - RNA, 22 nt, synthetic construct
  source 1..22: mol_type = other RNA
gaggtggattggggaatctaat

SEQ ID NO: 20760 - RNA, 22 nt, synthetic construct
  source 1..22: mol_type = other RNA
gagtaatgcatgtgacagtggg

SEQ ID NO: 20761 - RNA, 22 nt, synthetic construct
  source 1..22: mol_type = other RNA
gagtaccaggccaccttgacca

SEQ ID NO: 20762 - RNA, 22 nt, synthetic construct
  source 1..22: mol_type = other RNA
gagtagctgccttttagtgatc

SEQ ID NO: 20763 - RNA, 22 nt, synthetic construct
  source 1..22: mol_type = other RNA
gagttatttaagcttccaaaac

SEQ ID NO: 20764 - RNA, 22 nt, synthetic construct
  source 1..22: mol_type = other RNA
gagttccaggcaggatgaatct

SEQ ID NO: 20765 - RNA, 22 nt, synthetic construct
  source 1..22: mol_type = other RNA
gagttggacccgataaaataca

SEQ ID NO: 20766 - RNA, 22 nt, synthetic construct
  source 1..22: mol_type = other RNA
gagtttataatattttcttccc

SEQ ID NO: 20767 - RNA, 22 nt, synthetic construct
  source 1..22: mol_type = other RNA
gataaaatacaacagggatagg

SEQ ID NO: 20768 - RNA, 22 nt, synthetic construct
  source 1..22: mol_type = other RNA
gatacttgtcctcttcttagaa

SEQ ID NO: 20769 - RNA, 22 nt, synthetic construct
  source 1..22: mol_type = other RNA
gatagggtgtttctagagagat

SEQ ID NO: 20770 - RNA, 22 nt, synthetic construct
  source 1..22: mol_type = other RNA
gataggtgaggactatggcaaa

SEQ ID NO: 20771 - RNA, 22 nt, synthetic construct
  source 1..22: mol_type = other RNA
gatatatctctctagaaacacc

SEQ ID NO: 20772 - RNA, 22 nt, synthetic construct
  source 1..22: mol_type = other RNA
gatatatctggtcaaggtggcc

SEQ ID NO: 20773 - RNA, 22 nt, synthetic construct
  source 1..22: mol_type = other RNA
gatcaaatggagtaatgcatgt

SEQ ID NO: 20774 - RNA, 22 nt, synthetic construct
  source 1..22: mol_type = other RNA
gatcactaaaaggcagctactc

SEQ ID NO: 20775 - RNA, 22 nt, synthetic construct
  source 1..22: mol_type = other RNA
gatcagagcacagattcatcct

SEQ ID NO: 20776 - RNA, 22 nt, synthetic construct
  source 1..22: mol_type = other RNA
gatcataatggaaagtatgttc

SEQ ID NO: 20777 - RNA, 22 nt, synthetic construct
  source 1..22: mol_type = other RNA
gatcatgtaccctgaatataag

SEQ ID NO: 20778 - RNA, 22 nt, synthetic construct
  source 1..22: mol_type = other RNA
gatccctgaggcatttaatatg

SEQ ID NO: 20779 - RNA, 22 nt, synthetic construct
  source 1..22: mol_type = other RNA
gatgaatctgtgctctgatccc

SEQ ID NO: 20780 - RNA, 22 nt, synthetic construct
  source 1..22: mol_type = other RNA
gatgcaaagagctctcttagct

SEQ ID NO: 20781 - RNA, 22 nt, synthetic construct
  source 1..22: mol_type = other RNA
gatgctaattaaaacgcaaatc

SEQ ID NO: 20782 - RNA, 22 nt, synthetic construct
  source 1..22: mol_type = other RNA
gatgctctcacaaaatcttgcc

SEQ ID NO: 20783 - RNA, 22 nt, synthetic construct
  source 1..22: mol_type = other RNA
gatggggctagtagcctttcct

SEQ ID NO: 20784 - RNA, 22 nt, synthetic construct
  source 1..22: mol_type = other RNA
gatggtctagtcatgcctctca

SEQ ID NO: 20785 - RNA, 22 nt, synthetic construct
  source 1..22: mol_type = other RNA
gattacagtgatgctctcacaa

SEQ ID NO: 20786 - RNA, 22 nt, synthetic construct
  source 1..22: mol_type = other RNA
gattcatcctgcctggaactct

SEQ ID NO: 20787 - RNA, 22 nt, synthetic construct
  source 1..22: mol_type = other RNA
gattccccaatccacctcttga

SEQ ID NO: 20788 - RNA, 22 nt, synthetic construct
  source 1..22: mol_type = other RNA
gattgacactaaatatatgtgt

SEQ ID NO: 20789 - RNA, 22 nt, synthetic construct
  source 1..22: mol_type = other RNA
gattgctgtaaactagccaggt

SEQ ID NO: 20790 - RNA, 22 nt, synthetic construct
  source 1..22: mol_type = other RNA
gattggggaatctaatgaagac

SEQ ID NO: 20791 - RNA, 22 nt, synthetic construct
  source 1..22: mol_type = other RNA
gatttgcgttttaattagcatc

SEQ ID NO: 20792 - RNA, 22 nt, synthetic construct
  source 1..22: mol_type = other RNA
gattttgtgagagcatcactgt

SEQ ID NO: 20793 - RNA, 22 nt, synthetic construct
  source 1..22: mol_type = other RNA
gcaaagagctctcttagctttt

SEQ ID NO: 20794 - RNA, 22 nt, synthetic construct
  source 1..22: mol_type = other RNA
gcaaataccttaaatggttgag

SEQ ID NO: 20795 - RNA, 22 nt, synthetic construct
  source 1..22: mol_type = other RNA
gcaaatcccactgtcacatgca

SEQ ID NO: 20796 - RNA, 22 nt, synthetic construct
  source 1..22: mol_type = other RNA
gcaaatgggacagaacatactt

SEQ ID NO: 20797 - RNA, 22 nt, synthetic construct
  source 1..22: mol_type = other RNA
gcaagattttgtgagagcatca

SEQ ID NO: 20798 - RNA, 22 nt, synthetic construct
  source 1..22: mol_type = other RNA
gcaatatattcccaacctggct

SEQ ID NO: 20799 - RNA, 22 nt, synthetic construct
  source 1..22: mol_type = other RNA
gcaatcacctgtggatgctaat

SEQ ID NO: 20800 - RNA, 22 nt, synthetic construct
  source 1..22: mol_type = other RNA
gcacagattcatcctgcctgga

SEQ ID NO: 20801 - RNA, 22 nt, synthetic construct
  source 1..22: mol_type = other RNA
gcactaacacttctcttcattt

SEQ ID NO: 20802 - RNA, 22 nt, synthetic construct
  source 1..22: mol_type = other RNA
gcagctactcctccttgtctgg

SEQ ID NO: 20803 - RNA, 22 nt, synthetic construct
  source 1..22: mol_type = other RNA
gcaggatgaatctgtgctctga

SEQ ID NO: 20804 - RNA, 22 nt, synthetic construct
  source 1..22: mol_type = other RNA
gcatacaagagctggcaaatac

SEQ ID NO: 20805 - RNA, 22 nt, synthetic construct
  source 1..22: mol_type = other RNA
gcatcactgtaatcttttctaa

SEQ ID NO: 20806 - RNA, 22 nt, synthetic construct
  source 1..22: mol_type = other RNA
gcatccacaggtgattgctgta

SEQ ID NO: 20807 - RNA, 22 nt, synthetic construct
  source 1..22: mol_type = other RNA
gcatctgagcttctaataataa

SEQ ID NO: 20808 - RNA, 22 nt, synthetic construct
  source 1..22: mol_type = other RNA
gcatgactagaccatccatggg

SEQ ID NO: 20809 - RNA, 22 nt, synthetic construct
  source 1..22: mol_type = other RNA
gcatgtgacagtgggatttgcg

SEQ ID NO: 20810 - RNA, 22 nt, synthetic construct
  source 1..22: mol_type = other RNA
gcattactccatttgatcataa

SEQ ID NO: 20811 - RNA, 22 nt, synthetic construct
  source 1..22: mol_type = other RNA
gcatttaggttttgtttctttg

SEQ ID NO: 20812 - RNA, 22 nt, synthetic construct
  source 1..22: mol_type = other RNA
gccaccttgaccagatatatct

SEQ ID NO: 20813 - RNA, 22 nt, synthetic construct
  source 1..22: mol_type = other RNA
gccagacccctctctgactttg

SEQ ID NO: 20814 - RNA, 22 nt, synthetic construct
  source 1..22: mol_type = other RNA
gccagctcttgtatgcatttag

SEQ ID NO: 20815 - RNA, 22 nt, synthetic construct
  source 1..22: mol_type = other RNA
gccaggttgggaatatattgcc

SEQ ID NO: 20816 - RNA, 22 nt, synthetic construct
  source 1..22: mol_type = other RNA
gccagtaactggttgagcccaa

SEQ ID NO: 20817 - RNA, 22 nt, synthetic construct
  source 1..22: mol_type = other RNA
gccatagtcctcacctatccct

SEQ ID NO: 20818 - RNA, 22 nt, synthetic construct
  source 1..22: mol_type = other RNA
gcccaaattcaaacccagcctg

SEQ ID NO: 20819 - RNA, 22 nt, synthetic construct
  source 1..22: mol_type = other RNA
gcccacagtaaaacaaaaacaa

SEQ ID NO: 20820 - RNA, 22 nt, synthetic construct
  source 1..22: mol_type = other RNA
gccccatcaagaggtggattgg

SEQ ID NO: 20821 - RNA, 22 nt, synthetic construct
  source 1..22: mol_type = other RNA
gccgccttccctcaaacagaga

SEQ ID NO: 20822 - RNA, 22 nt, synthetic construct
  source 1..22: mol_type = other RNA
gcctaatgtttcagaaacagta

SEQ ID NO: 20823 - RNA, 22 nt, synthetic construct
  source 1..22: mol_type = other RNA
gcctcagggatcagagcacaga

SEQ ID NO: 20824 - RNA, 22 nt, synthetic construct
  source 1..22: mol_type = other RNA
gcctcccagacaaggaggagta

SEQ ID NO: 20825 - RNA, 22 nt, synthetic construct
  source 1..22: mol_type = other RNA
gcctctcattttggaaagtact

SEQ ID NO: 20826 - RNA, 22 nt, synthetic construct
  source 1..22: mol_type = other RNA
gcctggaactctctgtttgagg

SEQ ID NO: 20827 - RNA, 22 nt, synthetic construct
  source 1..22: mol_type = other RNA
gcctggtactcctccttctccc

SEQ ID NO: 20828 - RNA, 22 nt, synthetic construct
  source 1..22: mol_type = other RNA
gcctgtctgatacttgtcctct

SEQ ID NO: 20829 - RNA, 22 nt, synthetic construct
  source 1..22: mol_type = other RNA
gccttccctcaaacagagagtt

SEQ ID NO: 20830 - RNA, 22 nt, synthetic construct
  source 1..22: mol_type = other RNA
gcctttccttaatgatagggtg

SEQ ID NO: 20831 - RNA, 22 nt, synthetic construct
  source 1..22: mol_type = other RNA
gccttttagtgatcatgtaccc

SEQ ID NO: 20832 - RNA, 22 nt, synthetic construct
  source 1..22: mol_type = other RNA
gcggcaagattttgtgagagca

SEQ ID NO: 20833 - RNA, 22 nt, synthetic construct
  source 1..22: mol_type = other RNA
gcgttttaattagcatccacag

SEQ ID NO: 20834 - RNA, 22 nt, synthetic construct
  source 1..22: mol_type = other RNA
gctaagagagctctttgcatct

SEQ ID NO: 20835 - RNA, 22 nt, synthetic construct
  source 1..22: mol_type = other RNA
gctaattaaaacgcaaatccca

SEQ ID NO: 20836 - RNA, 22 nt, synthetic construct
  source 1..22: mol_type = other RNA
gctactaaatatacagattgac

SEQ ID NO: 20837 - RNA, 22 nt, synthetic construct
  source 1..22: mol_type = other RNA
gctactagccccatcaagaggt

SEQ ID NO: 20838 - RNA, 22 nt, synthetic construct
  source 1..22: mol_type = other RNA
gctactcctccttgtctgggag

SEQ ID NO: 20839 - RNA, 22 nt, synthetic construct
  source 1..22: mol_type = other RNA
gctagtagcctttccttaatga

SEQ ID NO: 20840 - RNA, 22 nt, synthetic construct
  source 1..22: mol_type = other RNA
gctagtttacagcaatcacctg

SEQ ID NO: 20841 - RNA, 22 nt, synthetic construct
  source 1..22: mol_type = other RNA
gctcaaccagttactggcttta

SEQ ID NO: 20842 - RNA, 22 nt, synthetic construct
  source 1..22: mol_type = other RNA
gctcagatgcaaagagctctct

SEQ ID NO: 20843 - RNA, 22 nt, synthetic construct
  source 1..22: mol_type = other RNA
gctcatgaaattaggtacaaag

SEQ ID NO: 20844 - RNA, 22 nt, synthetic construct
  source 1..22: mol_type = other RNA
gctctcacaaaatcttgccgcc

SEQ ID NO: 20845 - RNA, 22 nt, synthetic construct
  source 1..22: mol_type = other RNA
gctctcttagcttttaatgtta

SEQ ID NO: 20846 - RNA, 22 nt, synthetic construct
  source 1..22: mol_type = other RNA
gctctgatccctgaggcattta

SEQ ID NO: 20847 - RNA, 22 nt, synthetic construct
  source 1..22: mol_type = other RNA
gctcttgtatgcatttaggttt

SEQ ID NO: 20848 - RNA, 22 nt, synthetic construct
  source 1..22: mol_type = other RNA
gctctttgcatctgagcttcta

SEQ ID NO: 20849 - RNA, 22 nt, synthetic construct
  source 1..22: mol_type = other RNA
gctgccttttagtgatcatgta

SEQ ID NO: 20850 - RNA, 22 nt, synthetic construct
  source 1..22: mol_type = other RNA
gctggcaaataccttaaatggt

SEQ ID NO: 20851 - RNA, 22 nt, synthetic construct
  source 1..22: mol_type = other RNA
gctgggtttgaatttgggctca

SEQ ID NO: 20852 - RNA, 22 nt, synthetic construct
  source 1..22: mol_type = other RNA
gctgtaaactagccaggttggg

SEQ ID NO: 20853 - RNA, 22 nt, synthetic construct
  source 1..22: mol_type = other RNA
gctgtggggagaaggaggagta

SEQ ID NO: 20854 - RNA, 22 nt, synthetic construct
  source 1..22: mol_type = other RNA
gcttaaataactctccaaaagt

SEQ ID NO: 20855 - RNA, 22 nt, synthetic construct
  source 1..22: mol_type = other RNA
gcttccaaaacttaactgaaaa

SEQ ID NO: 20856 - RNA, 22 nt, synthetic construct
  source 1..22: mol_type = other RNA
gctttatgacttttggagagtt

SEQ ID NO: 20857 - RNA, 22 nt, synthetic construct
  source 1..22: mol_type = other RNA
ggaaaggctactagccccatca

SEQ ID NO: 20858 - RNA, 22 nt, synthetic construct
  source 1..22: mol_type = other RNA
ggaaagtactgtttctgaaaca

SEQ ID NO: 20859 - RNA, 22 nt, synthetic construct
  source 1..22: mol_type = other RNA
ggaaagtatgttctgtcccatt

SEQ ID NO: 20860 - RNA, 22 nt, synthetic construct
  source 1..22: mol_type = other RNA
ggaactctctgtttgagggaag

SEQ ID NO: 20861 - RNA, 22 nt, synthetic construct
  source 1..22: mol_type = other RNA
ggaagcttaaataactctccaa

SEQ ID NO: 20862 - RNA, 22 nt, synthetic construct
  source 1..22: mol_type = other RNA
ggaaggcggcaagattttgtga

SEQ ID NO: 20863 - RNA, 22 nt, synthetic construct
  source 1..22: mol_type = other RNA
ggaagtgggaagaaaatattat

SEQ ID NO: 20864 - RNA, 22 nt, synthetic construct
  source 1..22: mol_type = other RNA
ggaatatattgcctaatgtttc

SEQ ID NO: 20865 - RNA, 22 nt, synthetic construct
  source 1..22: mol_type = other RNA
ggaatctaatgaagacctgatt

SEQ ID NO: 20866 - RNA, 22 nt, synthetic construct
  source 1..22: mol_type = other RNA
ggacaagtatcagacaggctgg

SEQ ID NO: 20867 - RNA, 22 nt, synthetic construct
  source 1..22: mol_type = other RNA
ggacagaacatactttccatta

SEQ ID NO: 20868 - RNA, 22 nt, synthetic construct
  source 1..22: mol_type = other RNA
ggacccgataaaatacaacagg

SEQ ID NO: 20869 - RNA, 22 nt, synthetic construct
  source 1..22: mol_type = other RNA
ggactatggcaaatgggacaga

SEQ ID NO: 20870 - RNA, 22 nt, synthetic construct
  source 1..22: mol_type = other RNA
ggagaaggaggagtaccaggcc

SEQ ID NO: 20871 - RNA, 22 nt, synthetic construct
  source 1..22: mol_type = other RNA
ggagagttatttaagcttccaa

SEQ ID NO: 20872 - RNA, 22 nt, synthetic construct
  source 1..22: mol_type = other RNA
ggaggagtaccaggccaccttg

SEQ ID NO: 20873 - RNA, 22 nt, synthetic construct
  source 1..22: mol_type = other RNA
ggaggagtagctgccttttagt

SEQ ID NO: 20874 - RNA, 22 nt, synthetic construct
  source 1..22: mol_type = other RNA
ggaggctgtggggagaaggagg

SEQ ID NO: 20875 - RNA, 22 nt, synthetic construct
  source 1..22: mol_type = other RNA
ggagtaatgcatgtgacagtgg

SEQ ID NO: 20876 - RNA, 22 nt, synthetic construct
  source 1..22: mol_type = other RNA
ggagtaccaggccaccttgacc

SEQ ID NO: 20877 - RNA, 22 nt, synthetic construct
  source 1..22: mol_type = other RNA
ggagtagctgccttttagtgat

SEQ ID NO: 20878 - RNA, 22 nt, synthetic construct
  source 1..22: mol_type = other RNA
ggataggtgaggactatggcaa

SEQ ID NO: 20879 - RNA, 22 nt, synthetic construct
  source 1..22: mol_type = other RNA
ggatcagagcacagattcatcc

SEQ ID NO: 20880 - RNA, 22 nt, synthetic construct
  source 1..22: mol_type = other RNA
ggatgaatctgtgctctgatcc

SEQ ID NO: 20881 - RNA, 22 nt, synthetic construct
  source 1..22: mol_type = other RNA
ggatgctaattaaaacgcaaat

SEQ ID NO: 20882 - RNA, 22 nt, synthetic construct
  source 1..22: mol_type = other RNA
ggatggtctagtcatgcctctc

SEQ ID NO: 20883 - RNA, 22 nt, synthetic construct
  source 1..22: mol_type = other RNA
ggattggggaatctaatgaaga

SEQ ID NO: 20884 - RNA, 22 nt, synthetic construct
  source 1..22: mol_type = other RNA
ggatttgcgttttaattagcat

SEQ ID NO: 20885 - RNA, 22 nt, synthetic construct
  source 1..22: mol_type = other RNA
ggcaaataccttaaatggttga

SEQ ID NO: 20886 - RNA, 22 nt, synthetic construct
  source 1..22: mol_type = other RNA
ggcaaatgggacagaacatact

SEQ ID NO: 20887 - RNA, 22 nt, synthetic construct
  source 1..22: mol_type = other RNA
ggcaagattttgtgagagcatc

SEQ ID NO: 20888 - RNA, 22 nt, synthetic construct
  source 1..22: mol_type = other RNA
ggcaatatattcccaacctggc

SEQ ID NO: 20889 - RNA, 22 nt, synthetic construct
  source 1..22: mol_type = other RNA
ggcagctactcctccttgtctg

SEQ ID NO: 20890 - RNA, 22 nt, synthetic construct
  source 1..22: mol_type = other RNA
ggcaggatgaatctgtgctctg

SEQ ID NO: 20891 - RNA, 22 nt, synthetic construct
  source 1..22: mol_type = other RNA
ggcatgactagaccatccatgg

SEQ ID NO: 20892 - RNA, 22 nt, synthetic construct
  source 1..22: mol_type = other RNA
ggccaccttgaccagatatatc

SEQ ID NO: 20893 - RNA, 22 nt, synthetic construct
  source 1..22: mol_type = other RNA
ggcctggtactcctccttctcc

SEQ ID NO: 20894 - RNA, 22 nt, synthetic construct
  source 1..22: mol_type = other RNA
ggcggcaagattttgtgagagc

SEQ ID NO: 20895 - RNA, 22 nt, synthetic construct
  source 1..22: mol_type = other RNA
ggctactagccccatcaagagg

SEQ ID NO: 20896 - RNA, 22 nt, synthetic construct
  source 1..22: mol_type = other RNA
ggctagtagcctttccttaatg

SEQ ID NO: 20897 - RNA, 22 nt, synthetic construct
  source 1..22: mol_type = other RNA
ggctagtttacagcaatcacct

SEQ ID NO: 20898 - RNA, 22 nt, synthetic construct
  source 1..22: mol_type = other RNA
ggctcaaccagttactggcttt

SEQ ID NO: 20899 - RNA, 22 nt, synthetic construct
  source 1..22: mol_type = other RNA
ggctgggtttgaatttgggctc

SEQ ID NO: 20900 - RNA, 22 nt, synthetic construct
  source 1..22: mol_type = other RNA
ggctgtggggagaaggaggagt

SEQ ID NO: 20901 - RNA, 22 nt, synthetic construct
  source 1..22: mol_type = other RNA
ggctttatgacttttggagagt

SEQ ID NO: 20902 - RNA, 22 nt, synthetic construct
  source 1..22: mol_type = other RNA
gggaagaaaatattataaactc

SEQ ID NO: 20903 - RNA, 22 nt, synthetic construct
  source 1..22: mol_type = other RNA
gggaaggcggcaagattttgtg

SEQ ID NO: 20904 - RNA, 22 nt, synthetic construct
  source 1..22: mol_type = other RNA
gggaagtgggaagaaaatatta

SEQ ID NO: 20905 - RNA, 22 nt, synthetic construct
  source 1..22: mol_type = other RNA
gggaatatattgcctaatgttt

SEQ ID NO: 20906 - RNA, 22 nt, synthetic construct
  source 1..22: mol_type = other RNA
gggaatctaatgaagacctgat

SEQ ID NO: 20907 - RNA, 22 nt, synthetic construct
  source 1..22: mol_type = other RNA
gggacagaacatactttccatt

SEQ ID NO: 20908 - RNA, 22 nt, synthetic construct
  source 1..22: mol_type = other RNA
gggagaaggaggagtaccaggc

SEQ ID NO: 20909 - RNA, 22 nt, synthetic construct
  source 1..22: mol_type = other RNA
gggaggctgtggggagaaggag

SEQ ID NO: 20910 - RNA, 22 nt, synthetic construct
  source 1..22: mol_type = other RNA
gggataggtgaggactatggca

SEQ ID NO: 20911 - RNA, 22 nt, synthetic construct
  source 1..22: mol_type = other RNA
gggatcagagcacagattcatc

SEQ ID NO: 20912 - RNA, 22 nt, synthetic construct
  source 1..22: mol_type = other RNA
gggatttgcgttttaattagca

SEQ ID NO: 20913 - RNA, 22 nt, synthetic construct
  source 1..22: mol_type = other RNA
gggcataaattaatttttcagt

SEQ ID NO: 20914 - RNA, 22 nt, synthetic construct
  source 1..22: mol_type = other RNA
gggctagtagcctttccttaat

SEQ ID NO: 20915 - RNA, 22 nt, synthetic construct
  source 1..22: mol_type = other RNA
gggctcaaccagttactggctt

SEQ ID NO: 20916 - RNA, 22 nt, synthetic construct
  source 1..22: mol_type = other RNA
ggggaagtgggaagaaaatatt

SEQ ID NO: 20917 - RNA, 22 nt, synthetic construct
  source 1..22: mol_type = other RNA
ggggaatctaatgaagacctga

SEQ ID NO: 20918 - RNA, 22 nt, synthetic construct
  source 1..22: mol_type = other RNA
ggggagaaggaggagtaccagg

SEQ ID NO: 20919 - RNA, 22 nt, synthetic construct
  source 1..22: mol_type = other RNA
ggggctagtagcctttccttaa

SEQ ID NO: 20920 - RNA, 22 nt, synthetic construct
  source 1..22: mol_type = other RNA
gggtacatgatcactaaaaggc

SEQ ID NO: 20921 - RNA, 22 nt, synthetic construct
  source 1..22: mol_type = other RNA
gggtccaactcaaccatttaag

SEQ ID NO: 20922 - RNA, 22 nt, synthetic construct
  source 1..22: mol_type = other RNA
gggtgtttctagagagatatat

SEQ ID NO: 20923 - RNA, 22 nt, synthetic construct
  source 1..22: mol_type = other RNA
gggtttgaatttgggctcaacc

SEQ ID NO: 20924 - RNA, 22 nt, synthetic construct
  source 1..22: mol_type = other RNA
gggttttgtttttgttttactg

SEQ ID NO: 20925 - RNA, 22 nt, synthetic construct
  source 1..22: mol_type = other RNA
ggtacaaagtcagagaggggtc

SEQ ID NO: 20926 - RNA, 22 nt, synthetic construct
  source 1..22: mol_type = other RNA
ggtacatgatcactaaaaggca

SEQ ID NO: 20927 - RNA, 22 nt, synthetic construct
  source 1..22: mol_type = other RNA
ggtactcctccttctccccaca

SEQ ID NO: 20928 - RNA, 22 nt, synthetic construct
  source 1..22: mol_type = other RNA
ggtatttgccagctcttgtatg

SEQ ID NO: 20929 - RNA, 22 nt, synthetic construct
  source 1..22: mol_type = other RNA
ggtcaaggtggcctggtactcc

SEQ ID NO: 20930 - RNA, 22 nt, synthetic construct
  source 1..22: mol_type = other RNA
ggtccaactcaaccatttaagg

SEQ ID NO: 20931 - RNA, 22 nt, synthetic construct
  source 1..22: mol_type = other RNA
ggtctagtcatgcctctcattt

SEQ ID NO: 20932 - RNA, 22 nt, synthetic construct
  source 1..22: mol_type = other RNA
ggtcttcattagattccccaat

SEQ ID NO: 20933 - RNA, 22 nt, synthetic construct
  source 1..22: mol_type = other RNA
ggtgaggactatggcaaatggg

SEQ ID NO: 20934 - RNA, 22 nt, synthetic construct
  source 1..22: mol_type = other RNA
ggtgattgctgtaaactagcca

SEQ ID NO: 20935 - RNA, 22 nt, synthetic construct
  source 1..22: mol_type = other RNA
ggtggattggggaatctaatga

SEQ ID NO: 20936 - RNA, 22 nt, synthetic construct
  source 1..22: mol_type = other RNA
ggtggcctggtactcctccttc

SEQ ID NO: 20937 - RNA, 22 nt, synthetic construct
  source 1..22: mol_type = other RNA
ggtgtttctagagagatatatc

SEQ ID NO: 20938 - RNA, 22 nt, synthetic construct
  source 1..22: mol_type = other RNA
ggttgagcccaaattcaaaccc

SEQ ID NO: 20939 - RNA, 22 nt, synthetic construct
  source 1..22: mol_type = other RNA
ggttgagttggacccgataaaa

SEQ ID NO: 20940 - RNA, 22 nt, synthetic construct
  source 1..22: mol_type = other RNA
ggttgggaatatattgcctaat

SEQ ID NO: 20941 - RNA, 22 nt, synthetic construct
  source 1..22: mol_type = other RNA
ggtttgaatttgggctcaacca

SEQ ID NO: 20942 - RNA, 22 nt, synthetic construct
  source 1..22: mol_type = other RNA
ggttttgtttttgttttactgt

SEQ ID NO: 20943 - RNA, 22 nt, synthetic construct
  source 1..22: mol_type = other RNA
gtaaaacaaaaacaaaacccac

SEQ ID NO: 20944 - RNA, 22 nt, synthetic construct
  source 1..22: mol_type = other RNA
gtaaactagccaggttgggaat

SEQ ID NO: 20945 - RNA, 22 nt, synthetic construct
  source 1..22: mol_type = other RNA
gtaactggttgagcccaaattc

SEQ ID NO: 20946 - RNA, 22 nt, synthetic construct
  source 1..22: mol_type = other RNA
gtaatcttttctaagaagagga

SEQ ID NO: 20947 - RNA, 22 nt, synthetic construct
  source 1..22: mol_type = other RNA
gtaatgcatgtgacagtgggat

SEQ ID NO: 20948 - RNA, 22 nt, synthetic construct
  source 1..22: mol_type = other RNA
gtacaaagtcagagaggggtct

SEQ ID NO: 20949 - RNA, 22 nt, synthetic construct
  source 1..22: mol_type = other RNA
gtacatgatcactaaaaggcag

SEQ ID NO: 20950 - RNA, 22 nt, synthetic construct
  source 1..22: mol_type = other RNA
gtaccaggccaccttgaccaga

SEQ ID NO: 20951 - RNA, 22 nt, synthetic construct
  source 1..22: mol_type = other RNA
gtaccctgaatataagtgtatt

SEQ ID NO: 20952 - RNA, 22 nt, synthetic construct
  source 1..22: mol_type = other RNA
gtacctaatttcatgagctaaa

SEQ ID NO: 20953 - RNA, 22 nt, synthetic construct
  source 1..22: mol_type = other RNA
gtactcctccttctccccacag

SEQ ID NO: 20954 - RNA, 22 nt, synthetic construct
  source 1..22: mol_type = other RNA
gtactgtttctgaaacattagg

SEQ ID NO: 20955 - RNA, 22 nt, synthetic construct
  source 1..22: mol_type = other RNA
gtactttccaaaatgagaggca

SEQ ID NO: 20956 - RNA, 22 nt, synthetic construct
  source 1..22: mol_type = other RNA
gtagcactaacacttctcttca

SEQ ID NO: 20957 - RNA, 22 nt, synthetic construct
  source 1..22: mol_type = other RNA
gtagcctttccttaatgatagg

SEQ ID NO: 20958 - RNA, 22 nt, synthetic construct
  source 1..22: mol_type = other RNA
gtagctgccttttagtgatcat

SEQ ID NO: 20959 - RNA, 22 nt, synthetic construct
  source 1..22: mol_type = other RNA
gtatatttagtagcactaacac

SEQ ID NO: 20960 - RNA, 22 nt, synthetic construct
  source 1..22: mol_type = other RNA
gtatcagacaggctgggtttga

SEQ ID NO: 20961 - RNA, 22 nt, synthetic construct
  source 1..22: mol_type = other RNA
gtatgcatttaggttttgtttc

SEQ ID NO: 20962 - RNA, 22 nt, synthetic construct
  source 1..22: mol_type = other RNA
gtatgttctgtcccatttgcca

SEQ ID NO: 20963 - RNA, 22 nt, synthetic construct
  source 1..22: mol_type = other RNA
gtatttgccagctcttgtatgc

SEQ ID NO: 20964 - RNA, 22 nt, synthetic construct
  source 1..22: mol_type = other RNA
gtattttatcgggtccaactca

SEQ ID NO: 20965 - RNA, 22 nt, synthetic construct
  source 1..22: mol_type = other RNA
gtcaaggtggcctggtactcct

SEQ ID NO: 20966 - RNA, 22 nt, synthetic construct
  source 1..22: mol_type = other RNA
gtcaatctgtatatttagtagc

SEQ ID NO: 20967 - RNA, 22 nt, synthetic construct
  source 1..22: mol_type = other RNA
gtcacatgcattactccatttg

SEQ ID NO: 20968 - RNA, 22 nt, synthetic construct
  source 1..22: mol_type = other RNA
gtcataaagccagtaactggtt

SEQ ID NO: 20969 - RNA, 22 nt, synthetic construct
  source 1..22: mol_type = other RNA
gtcatgcctctcattttggaaa

SEQ ID NO: 20970 - RNA, 22 nt, synthetic construct
  source 1..22: mol_type = other RNA
gtccaactcaaccatttaaggt

SEQ ID NO: 20971 - RNA, 22 nt, synthetic construct
  source 1..22: mol_type = other RNA
gtcccatttgccatagtcctca

SEQ ID NO: 20972 - RNA, 22 nt, synthetic construct
  source 1..22: mol_type = other RNA
gtcctcacctatccctgttgta

SEQ ID NO: 20973 - RNA, 22 nt, synthetic construct
  source 1..22: mol_type = other RNA
gtcctcttcttagaaaagatta

SEQ ID NO: 20974 - RNA, 22 nt, synthetic construct
  source 1..22: mol_type = other RNA
gtctagtcatgcctctcatttt

SEQ ID NO: 20975 - RNA, 22 nt, synthetic construct
  source 1..22: mol_type = other RNA
gtctgatacttgtcctcttctt

SEQ ID NO: 20976 - RNA, 22 nt, synthetic construct
  source 1..22: mol_type = other RNA
gtctgggaggctgtggggagaa

SEQ ID NO: 20977 - RNA, 22 nt, synthetic construct
  source 1..22: mol_type = other RNA
gtcttcattagattccccaatc

SEQ ID NO: 20978 - RNA, 22 nt, synthetic construct
  source 1..22: mol_type = other RNA
gtgacagtgggatttgcgtttt

SEQ ID NO: 20979 - RNA, 22 nt, synthetic construct
  source 1..22: mol_type = other RNA
gtgagagcatcactgtaatctt

SEQ ID NO: 20980 - RNA, 22 nt, synthetic construct
  source 1..22: mol_type = other RNA
gtgaggactatggcaaatggga

SEQ ID NO: 20981 - RNA, 22 nt, synthetic construct
  source 1..22: mol_type = other RNA
gtgatcatgtaccctgaatata

SEQ ID NO: 20982 - RNA, 22 nt, synthetic construct
  source 1..22: mol_type = other RNA
gtgatgctctcacaaaatcttg

SEQ ID NO: 20983 - RNA, 22 nt, synthetic construct
  source 1..22: mol_type = other RNA
gtgattgctgtaaactagccag

SEQ ID NO: 20984 - RNA, 22 nt, synthetic construct
  source 1..22: mol_type = other RNA
gtgctactaaatatacagattg

SEQ ID NO: 20985 - RNA, 22 nt, synthetic construct
  source 1..22: mol_type = other RNA
gtgctctgatccctgaggcatt

SEQ ID NO: 20986 - RNA, 22 nt, synthetic construct
  source 1..22: mol_type = other RNA
gtggatgctaattaaaacgcaa

SEQ ID NO: 20987 - RNA, 22 nt, synthetic construct
  source 1..22: mol_type = other RNA
gtggattggggaatctaatgaa

SEQ ID NO: 20988 - RNA, 22 nt, synthetic construct
  source 1..22: mol_type = other RNA
gtggcctggtactcctccttct

SEQ ID NO: 20989 - RNA, 22 nt, synthetic construct
  source 1..22: mol_type = other RNA
gtgggaagaaaatattataaac

SEQ ID NO: 20990 - RNA, 22 nt, synthetic construct
  source 1..22: mol_type = other RNA
gtgggatttgcgttttaattag

SEQ ID NO: 20991 - RNA, 22 nt, synthetic construct
  source 1..22: mol_type = other RNA
gtgggcataaattaatttttca

SEQ ID NO: 20992 - RNA, 22 nt, synthetic construct
  source 1..22: mol_type = other RNA
gtggggagaaggaggagtacca

SEQ ID NO: 20993 - RNA, 22 nt, synthetic construct
  source 1..22: mol_type = other RNA
gtgggttttgtttttgttttac

SEQ ID NO: 20994 - RNA, 22 nt, synthetic construct
  source 1..22: mol_type = other RNA
gtgtcaatctgtatatttagta

SEQ ID NO: 20995 - RNA, 22 nt, synthetic construct
  source 1..22: mol_type = other RNA
gtgtgggttttgtttttgtttt

SEQ ID NO: 20996 - RNA, 22 nt, synthetic construct
  source 1..22: mol_type = other RNA
gtgtgtgggttttgtttttgtt

SEQ ID NO: 20997 - RNA, 22 nt, synthetic construct
  source 1..22: mol_type = other RNA
gtgttagtgctactaaatatac

SEQ ID NO: 20998 - RNA, 22 nt, synthetic construct
  source 1..22: mol_type = other RNA
gtgtttctagagagatatatct

SEQ ID NO: 20999 - RNA, 22 nt, synthetic construct
  source 1..22: mol_type = other RNA
gttaagttttggaagcttaaat

SEQ ID NO: 21000 - RNA, 22 nt, synthetic construct
  source 1..22: mol_type = other RNA
gttactggctttatgacttttg

SEQ ID NO: 21001 - RNA, 22 nt, synthetic construct
  source 1..22: mol_type = other RNA
gttagtgctactaaatatacag

SEQ ID NO: 21002 - RNA, 22 nt, synthetic construct
  source 1..22: mol_type = other RNA
gttatttaagcttccaaaactt

SEQ ID NO: 21003 - RNA, 22 nt, synthetic construct
  source 1..22: mol_type = other RNA
gttccaggcaggatgaatctgt

SEQ ID NO: 21004 - RNA, 22 nt, synthetic construct
  source 1..22: mol_type = other RNA
gttctgtcccatttgccatagt

SEQ ID NO: 21005 - RNA, 22 nt, synthetic construct
  source 1..22: mol_type = other RNA
gttcttattattagaagctcag

SEQ ID NO: 21006 - RNA, 22 nt, synthetic construct
  source 1..22: mol_type = other RNA
gttgagcccaaattcaaaccca

SEQ ID NO: 21007 - RNA, 22 nt, synthetic construct
  source 1..22: mol_type = other RNA
gttgagttggacccgataaaat

SEQ ID NO: 21008 - RNA, 22 nt, synthetic construct
  source 1..22: mol_type = other RNA
gttggacccgataaaatacaac

SEQ ID NO: 21009 - RNA, 22 nt, synthetic construct
  source 1..22: mol_type = other RNA
gttgggaatatattgcctaatg

SEQ ID NO: 21010 - RNA, 22 nt, synthetic construct
  source 1..22: mol_type = other RNA
gttgtattttatcgggtccaac

SEQ ID NO: 21011 - RNA, 22 nt, synthetic construct
  source 1..22: mol_type = other RNA
gtttacagcaatcacctgtgga

SEQ ID NO: 21012 - RNA, 22 nt, synthetic construct
  source 1..22: mol_type = other RNA
gtttataatattttcttcccac

SEQ ID NO: 21013 - RNA, 22 nt, synthetic construct
  source 1..22: mol_type = other RNA
gtttcagaaacagtactttcca

SEQ ID NO: 21014 - RNA, 22 nt, synthetic construct
  source 1..22: mol_type = other RNA
gtttctagagagatatatctgg

SEQ ID NO: 21015 - RNA, 22 nt, synthetic construct
  source 1..22: mol_type = other RNA
gtttctgaaacattaggcaata

SEQ ID NO: 21016 - RNA, 22 nt, synthetic construct
  source 1..22: mol_type = other RNA
gtttctttgttttttagctcat

SEQ ID NO: 21017 - RNA, 22 nt, synthetic construct
  source 1..22: mol_type = other RNA
gtttgaatttgggctcaaccag

SEQ ID NO: 21018 - RNA, 22 nt, synthetic construct
  source 1..22: mol_type = other RNA
gtttgagggaaggcggcaagat

SEQ ID NO: 21019 - RNA, 22 nt, synthetic construct
  source 1..22: mol_type = other RNA
gttttaattagcatccacaggt

SEQ ID NO: 21020 - RNA, 22 nt, synthetic construct
  source 1..22: mol_type = other RNA
gttttactgtgggcataaatta

SEQ ID NO: 21021 - RNA, 22 nt, synthetic construct
  source 1..22: mol_type = other RNA
gttttggaagcttaaataactc

SEQ ID NO: 21022 - RNA, 22 nt, synthetic construct
  source 1..22: mol_type = other RNA
gttttgtttttgttttactgtg

SEQ ID NO: 21023 - RNA, 22 nt, synthetic construct
  source 1..22: mol_type = other RNA
gtttttgttttactgtgggcat

SEQ ID NO: 21024 - RNA, 22 nt, synthetic construct
  source 1..22: mol_type = other RNA
gttttttagctcatgaaattag

SEQ ID NO: 21025 - RNA, 22 nt, synthetic construct
  source 1..22: mol_type = other RNA
taaaacaaaaacaaaacccaca

SEQ ID NO: 21026 - RNA, 22 nt, synthetic construct
  source 1..22: mol_type = other RNA
taaaacgcaaatcccactgtca

SEQ ID NO: 21027 - RNA, 22 nt, synthetic construct
  source 1..22: mol_type = other RNA
taaaagctaagagagctctttg

SEQ ID NO: 21028 - RNA, 22 nt, synthetic construct
  source 1..22: mol_type = other RNA
taaaaggcagctactcctcctt

SEQ ID NO: 21029 - RNA, 22 nt, synthetic construct
  source 1..22: mol_type = other RNA
taaaatacaacagggataggtg

SEQ ID NO: 21030 - RNA, 22 nt, synthetic construct
  source 1..22: mol_type = other RNA
taaactagccaggttgggaata

SEQ ID NO: 21031 - RNA, 22 nt, synthetic construct
  source 1..22: mol_type = other RNA
taaagccagtaactggttgagc

SEQ ID NO: 21032 - RNA, 22 nt, synthetic construct
  source 1..22: mol_type = other RNA
taaataactctccaaaagtcat

SEQ ID NO: 21033 - RNA, 22 nt, synthetic construct
  source 1..22: mol_type = other RNA
taaatacacttatattcagggt

SEQ ID NO: 21034 - RNA, 22 nt, synthetic construct
  source 1..22: mol_type = other RNA
taaatgcatacaagagctggca

SEQ ID NO: 21035 - RNA, 22 nt, synthetic construct
  source 1..22: mol_type = other RNA
taaatgcctcagggatcagagc

SEQ ID NO: 21036 - RNA, 22 nt, synthetic construct
  source 1..22: mol_type = other RNA
taaatggttgagttggacccga

SEQ ID NO: 21037 - RNA, 22 nt, synthetic construct
  source 1..22: mol_type = other RNA
taacacttctcttcattttcaa

SEQ ID NO: 21038 - RNA, 22 nt, synthetic construct
  source 1..22: mol_type = other RNA
taacattaaaagctaagagagc

SEQ ID NO: 21039 - RNA, 22 nt, synthetic construct
  source 1..22: mol_type = other RNA
taactctccaaaagtcataaag

SEQ ID NO: 21040 - RNA, 22 nt, synthetic construct
  source 1..22: mol_type = other RNA
taactggttgagcccaaattca

SEQ ID NO: 21041 - RNA, 22 nt, synthetic construct
  source 1..22: mol_type = other RNA
taagaacatattaaatgcctca

SEQ ID NO: 21042 - RNA, 22 nt, synthetic construct
  source 1..22: mol_type = other RNA
taagaagaggacaagtatcaga

SEQ ID NO: 21043 - RNA, 22 nt, synthetic construct
  source 1..22: mol_type = other RNA
taagagagctctttgcatctga

SEQ ID NO: 21044 - RNA, 22 nt, synthetic construct
  source 1..22: mol_type = other RNA
taagcttccaaaacttaactga

SEQ ID NO: 21045 - RNA, 22 nt, synthetic construct
  source 1..22: mol_type = other RNA
taaggaaaggctactagcccca

SEQ ID NO: 21046 - RNA, 22 nt, synthetic construct
  source 1..22: mol_type = other RNA
taaggtatttgccagctcttgt

SEQ ID NO: 21047 - RNA, 22 nt, synthetic construct
  source 1..22: mol_type = other RNA
taatattttcttcccacttccc

SEQ ID NO: 21048 - RNA, 22 nt, synthetic construct
  source 1..22: mol_type = other RNA
taatcttttctaagaagaggac

SEQ ID NO: 21049 - RNA, 22 nt, synthetic construct
  source 1..22: mol_type = other RNA
taatgatagggtgtttctagag

SEQ ID NO: 21050 - RNA, 22 nt, synthetic construct
  source 1..22: mol_type = other RNA
taatgcatgtgacagtgggatt

SEQ ID NO: 21051 - RNA, 22 nt, synthetic construct
  source 1..22: mol_type = other RNA
taatggaaagtatgttctgtcc

SEQ ID NO: 21052 - RNA, 22 nt, synthetic construct
  source 1..22: mol_type = other RNA
taatgtttcagaaacagtactt

SEQ ID NO: 21053 - RNA, 22 nt, synthetic construct
  source 1..22: mol_type = other RNA
taattaaaacgcaaatcccact

SEQ ID NO: 21054 - RNA, 22 nt, synthetic construct
  source 1..22: mol_type = other RNA
taattagcatccacaggtgatt

SEQ ID NO: 21055 - RNA, 22 nt, synthetic construct
  source 1..22: mol_type = other RNA
taatttatgcccacagtaaaac

SEQ ID NO: 21056 - RNA, 22 nt, synthetic construct
  source 1..22: mol_type = other RNA
tacaaagtcagagaggggtctg

SEQ ID NO: 21057 - RNA, 22 nt, synthetic construct
  source 1..22: mol_type = other RNA
tacaacagggataggtgaggac

SEQ ID NO: 21058 - RNA, 22 nt, synthetic construct
  source 1..22: mol_type = other RNA
tacaagagctggcaaatacctt

SEQ ID NO: 21059 - RNA, 22 nt, synthetic construct
  source 1..22: mol_type = other RNA
tacacttatattcagggtacat

SEQ ID NO: 21060 - RNA, 22 nt, synthetic construct
  source 1..22: mol_type = other RNA
tacagcaatcacctgtggatgc

SEQ ID NO: 21061 - RNA, 22 nt, synthetic construct
  source 1..22: mol_type = other RNA
tacagtgatgctctcacaaaat

SEQ ID NO: 21062 - RNA, 22 nt, synthetic construct
  source 1..22: mol_type = other RNA
tacatgatcactaaaaggcagc

SEQ ID NO: 21063 - RNA, 22 nt, synthetic construct
  source 1..22: mol_type = other RNA
taccaggccaccttgaccagat

SEQ ID NO: 21064 - RNA, 22 nt, synthetic construct
  source 1..22: mol_type = other RNA
taccctgaatataagtgtattt

SEQ ID NO: 21065 - RNA, 22 nt, synthetic construct
  source 1..22: mol_type = other RNA
tacctaatttcatgagctaaaa

SEQ ID NO: 21066 - RNA, 22 nt, synthetic construct
  source 1..22: mol_type = other RNA
taccttaaatggttgagttgga

SEQ ID NO: 21067 - RNA, 22 nt, synthetic construct
  source 1..22: mol_type = other RNA
tactaaatatacagattgacac

SEQ ID NO: 21068 - RNA, 22 nt, synthetic construct
  source 1..22: mol_type = other RNA
tactagccccatcaagaggtgg

SEQ ID NO: 21069 - RNA, 22 nt, synthetic construct
  source 1..22: mol_type = other RNA
tactccatttgatcataatgga

SEQ ID NO: 21070 - RNA, 22 nt, synthetic construct
  source 1..22: mol_type = other RNA
tactcctccttctccccacagc

SEQ ID NO: 21071 - RNA, 22 nt, synthetic construct
  source 1..22: mol_type = other RNA
tactcctccttgtctgggaggc

SEQ ID NO: 21072 - RNA, 22 nt, synthetic construct
  source 1..22: mol_type = other RNA
tactggctttatgacttttgga

SEQ ID NO: 21073 - RNA, 22 nt, synthetic construct
  source 1..22: mol_type = other RNA
tactgtgggcataaattaattt

SEQ ID NO: 21074 - RNA, 22 nt, synthetic construct
  source 1..22: mol_type = other RNA
tactgtttctgaaacattaggc

SEQ ID NO: 21075 - RNA, 22 nt, synthetic construct
  source 1..22: mol_type = other RNA
tacttgtcctcttcttagaaaa

SEQ ID NO: 21076 - RNA, 22 nt, synthetic construct
  source 1..22: mol_type = other RNA
tactttccaaaatgagaggcat

SEQ ID NO: 21077 - RNA, 22 nt, synthetic construct
  source 1..22: mol_type = other RNA
tactttccattatgatcaaatg

SEQ ID NO: 21078 - RNA, 22 nt, synthetic construct
  source 1..22: mol_type = other RNA
tagaaaagattacagtgatgct

SEQ ID NO: 21079 - RNA, 22 nt, synthetic construct
  source 1..22: mol_type = other RNA
tagaaacaccctatcattaagg

SEQ ID NO: 21080 - RNA, 22 nt, synthetic construct
  source 1..22: mol_type = other RNA
tagaagctcagatgcaaagagc

SEQ ID NO: 21081 - RNA, 22 nt, synthetic construct
  source 1..22: mol_type = other RNA
tagaccatccatggggaagtgg

SEQ ID NO: 21082 - RNA, 22 nt, synthetic construct
  source 1..22: mol_type = other RNA
tagagagatatatctggtcaag

SEQ ID NO: 21083 - RNA, 22 nt, synthetic construct
  source 1..22: mol_type = other RNA
tagattccccaatccacctctt

SEQ ID NO: 21084 - RNA, 22 nt, synthetic construct
  source 1..22: mol_type = other RNA
tagcactaacacttctcttcat

SEQ ID NO: 21085 - RNA, 22 nt, synthetic construct
  source 1..22: mol_type = other RNA
tagcatccacaggtgattgctg

SEQ ID NO: 21086 - RNA, 22 nt, synthetic construct
  source 1..22: mol_type = other RNA
tagccaggttgggaatatattg

SEQ ID NO: 21087 - RNA, 22 nt, synthetic construct
  source 1..22: mol_type = other RNA
tagccccatcaagaggtggatt

SEQ ID NO: 21088 - RNA, 22 nt, synthetic construct
  source 1..22: mol_type = other RNA
tagcctttccttaatgataggg

SEQ ID NO: 21089 - RNA, 22 nt, synthetic construct
  source 1..22: mol_type = other RNA
tagctcatgaaattaggtacaa

SEQ ID NO: 21090 - RNA, 22 nt, synthetic construct
  source 1..22: mol_type = other RNA
tagctgccttttagtgatcatg

SEQ ID NO: 21091 - RNA, 22 nt, synthetic construct
  source 1..22: mol_type = other RNA
taggcaatatattcccaacctg

SEQ ID NO: 21092 - RNA, 22 nt, synthetic construct
  source 1..22: mol_type = other RNA
tagggtgtttctagagagatat

SEQ ID NO: 21093 - RNA, 22 nt, synthetic construct
  source 1..22: mol_type = other RNA
taggtacaaagtcagagagggg

SEQ ID NO: 21094 - RNA, 22 nt, synthetic construct
  source 1..22: mol_type = other RNA
taggtgaggactatggcaaatg

SEQ ID NO: 21095 - RNA, 22 nt, synthetic construct
  source 1..22: mol_type = other RNA
tagtagcactaacacttctctt

SEQ ID NO: 21096 - RNA, 22 nt, synthetic construct
  source 1..22: mol_type = other RNA
tagtagcctttccttaatgata

SEQ ID NO: 21097 - RNA, 22 nt, synthetic construct
  source 1..22: mol_type = other RNA
tagtcatgcctctcattttgga

SEQ ID NO: 21098 - RNA, 22 nt, synthetic construct
  source 1..22: mol_type = other RNA
tagtcctcacctatccctgttg

SEQ ID NO: 21099 - RNA, 22 nt, synthetic construct
  source 1..22: mol_type = other RNA
tagtgatcatgtaccctgaata

SEQ ID NO: 21100 - RNA, 22 nt, synthetic construct
  source 1..22: mol_type = other RNA
tagtgctactaaatatacagat

SEQ ID NO: 21101 - RNA, 22 nt, synthetic construct
  source 1..22: mol_type = other RNA
tagtgtcaatctgtatatttag

SEQ ID NO: 21102 - RNA, 22 nt, synthetic construct
  source 1..22: mol_type = other RNA
tagtttacagcaatcacctgtg

SEQ ID NO: 21103 - RNA, 22 nt, synthetic construct
  source 1..22: mol_type = other RNA
tataatattttcttcccacttc

SEQ ID NO: 21104 - RNA, 22 nt, synthetic construct
  source 1..22: mol_type = other RNA
tatatctctctagaaacaccct

SEQ ID NO: 21105 - RNA, 22 nt, synthetic construct
  source 1..22: mol_type = other RNA
tatatctggtcaaggtggcctg

SEQ ID NO: 21106 - RNA, 22 nt, synthetic construct
  source 1..22: mol_type = other RNA
tatatgccagacccctctctga

SEQ ID NO: 21107 - RNA, 22 nt, synthetic construct
  source 1..22: mol_type = other RNA
tatattcagggtacatgatcac

SEQ ID NO: 21108 - RNA, 22 nt, synthetic construct
  source 1..22: mol_type = other RNA
tatattcccaacctggctagtt

SEQ ID NO: 21109 - RNA, 22 nt, synthetic construct
  source 1..22: mol_type = other RNA
tatattgcctaatgtttcagaa

SEQ ID NO: 21110 - RNA, 22 nt, synthetic construct
  source 1..22: mol_type = other RNA
tatatttagtagcactaacact

SEQ ID NO: 21111 - RNA, 22 nt, synthetic construct
  source 1..22: mol_type = other RNA
tatcagacaggctgggtttgaa

SEQ ID NO: 21112 - RNA, 22 nt, synthetic construct
  source 1..22: mol_type = other RNA
tatcattaaggaaaggctacta

SEQ ID NO: 21113 - RNA, 22 nt, synthetic construct
  source 1..22: mol_type = other RNA
tatccctgttgtattttatcgg

SEQ ID NO: 21114 - RNA, 22 nt, synthetic construct
  source 1..22: mol_type = other RNA
tatcgggtccaactcaaccatt

SEQ ID NO: 21115 - RNA, 22 nt, synthetic construct
  source 1..22: mol_type = other RNA
tatctctctagaaacaccctat

SEQ ID NO: 21116 - RNA, 22 nt, synthetic construct
  source 1..22: mol_type = other RNA
tatctggtcaaggtggcctggt

SEQ ID NO: 21117 - RNA, 22 nt, synthetic construct
  source 1..22: mol_type = other RNA
tatgacttttggagagttattt

SEQ ID NO: 21118 - RNA, 22 nt, synthetic construct
  source 1..22: mol_type = other RNA
tatgatcaaatggagtaatgca

SEQ ID NO: 21119 - RNA, 22 nt, synthetic construct
  source 1..22: mol_type = other RNA
tatgcatttaggttttgtttct

SEQ ID NO: 21120 - RNA, 22 nt, synthetic construct
  source 1..22: mol_type = other RNA
tatgccagacccctctctgact

SEQ ID NO: 21121 - RNA, 22 nt, synthetic construct
  source 1..22: mol_type = other RNA
tatgcccacagtaaaacaaaaa

SEQ ID NO: 21122 - RNA, 22 nt, synthetic construct
  source 1..22: mol_type = other RNA
tatggcaaatgggacagaacat

SEQ ID NO: 21123 - RNA, 22 nt, synthetic construct
  source 1..22: mol_type = other RNA
tatgttctgtcccatttgccat

SEQ ID NO: 21124 - RNA, 22 nt, synthetic construct
  source 1..22: mol_type = other RNA
tattaaatgcctcagggatcag

SEQ ID NO: 21125 - RNA, 22 nt, synthetic construct
  source 1..22: mol_type = other RNA
tattagaagctcagatgcaaag

SEQ ID NO: 21126 - RNA, 22 nt, synthetic construct
  source 1..22: mol_type = other RNA
tattattagaagctcagatgca

SEQ ID NO: 21127 - RNA, 22 nt, synthetic construct
  source 1..22: mol_type = other RNA
tattcagggtacatgatcacta

SEQ ID NO: 21128 - RNA, 22 nt, synthetic construct
  source 1..22: mol_type = other RNA
tattcccaacctggctagttta

SEQ ID NO: 21129 - RNA, 22 nt, synthetic construct
  source 1..22: mol_type = other RNA
tattgcctaatgtttcagaaac

SEQ ID NO: 21130 - RNA, 22 nt, synthetic construct
  source 1..22: mol_type = other RNA
tatttagtagcactaacacttc

SEQ ID NO: 21131 - RNA, 22 nt, synthetic construct
  source 1..22: mol_type = other RNA
tatttgccagctcttgtatgca

SEQ ID NO: 21132 - RNA, 22 nt, synthetic construct
  source 1..22: mol_type = other RNA
tattttatcgggtccaactcaa

SEQ ID NO: 21133 - RNA, 22 nt, synthetic construct
  source 1..22: mol_type = other RNA
tattttcttcccacttccccat

SEQ ID NO: 21134 - RNA, 22 nt, synthetic construct
  source 1..22: mol_type = other RNA
tcaaacagagagttccaggcag

SEQ ID NO: 21135 - RNA, 22 nt, synthetic construct
  source 1..22: mol_type = other RNA
tcaaacccagcctgtctgatac

SEQ ID NO: 21136 - RNA, 22 nt, synthetic construct
  source 1..22: mol_type = other RNA
tcaaatggagtaatgcatgtga

SEQ ID NO: 21137 - RNA, 22 nt, synthetic construct
  source 1..22: mol_type = other RNA
tcaaccagttactggctttatg

SEQ ID NO: 21138 - RNA, 22 nt, synthetic construct
  source 1..22: mol_type = other RNA
tcaaccatttaaggtatttgcc

SEQ ID NO: 21139 - RNA, 22 nt, synthetic construct
  source 1..22: mol_type = other RNA
tcaagaggtggattggggaatc

SEQ ID NO: 21140 - RNA, 22 nt, synthetic construct
  source 1..22: mol_type = other RNA
tcaaggtggcctggtactcctc

SEQ ID NO: 21141 - RNA, 22 nt, synthetic construct
  source 1..22: mol_type = other RNA
tcaatctgtatatttagtagca

SEQ ID NO: 21142 - RNA, 22 nt, synthetic construct
  source 1..22: mol_type = other RNA
tcacaaaatcttgccgccttcc

SEQ ID NO: 21143 - RNA, 22 nt, synthetic construct
  source 1..22: mol_type = other RNA
tcacatgcattactccatttga

SEQ ID NO: 21144 - RNA, 22 nt, synthetic construct
  source 1..22: mol_type = other RNA
tcacctatccctgttgtatttt

SEQ ID NO: 21145 - RNA, 22 nt, synthetic construct
  source 1..22: mol_type = other RNA
tcacctgtggatgctaattaaa

SEQ ID NO: 21146 - RNA, 22 nt, synthetic construct
  source 1..22: mol_type = other RNA
tcactaaaaggcagctactcct

SEQ ID NO: 21147 - RNA, 22 nt, synthetic construct
  source 1..22: mol_type = other RNA
tcactgtaatcttttctaagaa

SEQ ID NO: 21148 - RNA, 22 nt, synthetic construct
  source 1..22: mol_type = other RNA
tcagaaacagtactttccaaaa

SEQ ID NO: 21149 - RNA, 22 nt, synthetic construct
  source 1..22: mol_type = other RNA
tcagacaggctgggtttgaatt

SEQ ID NO: 21150 - RNA, 22 nt, synthetic construct
  source 1..22: mol_type = other RNA
tcagagcacagattcatcctgc

SEQ ID NO: 21151 - RNA, 22 nt, synthetic construct
  source 1..22: mol_type = other RNA
tcagatgcaaagagctctctta

SEQ ID NO: 21152 - RNA, 22 nt, synthetic construct
  source 1..22: mol_type = other RNA
tcagggatcagagcacagattc

SEQ ID NO: 21153 - RNA, 22 nt, synthetic construct
  source 1..22: mol_type = other RNA
tcagggtacatgatcactaaaa

SEQ ID NO: 21154 - RNA, 22 nt, synthetic construct
  source 1..22: mol_type = other RNA
tcaggtcttcattagattcccc

SEQ ID NO: 21155 - RNA, 22 nt, synthetic construct
  source 1..22: mol_type = other RNA
tcagttaagttttggaagctta

SEQ ID NO: 21156 - RNA, 22 nt, synthetic construct
  source 1..22: mol_type = other RNA
tcataaagccagtaactggttg

SEQ ID NO: 21157 - RNA, 22 nt, synthetic construct
  source 1..22: mol_type = other RNA
tcataacattaaaagctaagag

SEQ ID NO: 21158 - RNA, 22 nt, synthetic construct
  source 1..22: mol_type = other RNA
tcataatggaaagtatgttctg

SEQ ID NO: 21159 - RNA, 22 nt, synthetic construct
  source 1..22: mol_type = other RNA
tcatcctgcctggaactctctg

SEQ ID NO: 21160 - RNA, 22 nt, synthetic construct
  source 1..22: mol_type = other RNA
tcatgaaattaggtacaaagtc

SEQ ID NO: 21161 - RNA, 22 nt, synthetic construct
  source 1..22: mol_type = other RNA
tcatgagctaaaaaacaaagaa

SEQ ID NO: 21162 - RNA, 22 nt, synthetic construct
  source 1..22: mol_type = other RNA
tcatgcctctcattttggaaag

SEQ ID NO: 21163 - RNA, 22 nt, synthetic construct
  source 1..22: mol_type = other RNA
tcatgtaccctgaatataagtg

SEQ ID NO: 21164 - RNA, 22 nt, synthetic construct
  source 1..22: mol_type = other RNA
tcattaaggaaaggctactagc

SEQ ID NO: 21165 - RNA, 22 nt, synthetic construct
  source 1..22: mol_type = other RNA
tcattagattccccaatccacc

SEQ ID NO: 21166 - RNA, 22 nt, synthetic construct
  source 1..22: mol_type = other RNA
tcattgaaaatgaagagaagtg

SEQ ID NO: 21167 - RNA, 22 nt, synthetic construct
  source 1..22: mol_type = other RNA
tcattttggaaagtactgtttc

SEQ ID NO: 21168 - RNA, 22 nt, synthetic construct
  source 1..22: mol_type = other RNA
tccaaaagtcataaagccagta

SEQ ID NO: 21169 - RNA, 22 nt, synthetic construct
  source 1..22: mol_type = other RNA
tccaaaatgagaggcatgacta

SEQ ID NO: 21170 - RNA, 22 nt, synthetic construct
  source 1..22: mol_type = other RNA
tccaactcaaccatttaaggta

SEQ ID NO: 21171 - RNA, 22 nt, synthetic construct
  source 1..22: mol_type = other RNA
tccacaggtgattgctgtaaac

SEQ ID NO: 21172 - RNA, 22 nt, synthetic construct
  source 1..22: mol_type = other RNA
tccacctcttgatggggctagt

SEQ ID NO: 21173 - RNA, 22 nt, synthetic construct
  source 1..22: mol_type = other RNA
tccaggcaggatgaatctgtgc

SEQ ID NO: 21174 - RNA, 22 nt, synthetic construct
  source 1..22: mol_type = other RNA
tccatggggaagtgggaagaaa

SEQ ID NO: 21175 - RNA, 22 nt, synthetic construct
  source 1..22: mol_type = other RNA
tccattatgatcaaatggagta

SEQ ID NO: 21176 - RNA, 22 nt, synthetic construct
  source 1..22: mol_type = other RNA
tccatttgatcataatggaaag

SEQ ID NO: 21177 - RNA, 22 nt, synthetic construct
  source 1..22: mol_type = other RNA
tcccaacctggctagtttacag

SEQ ID NO: 21178 - RNA, 22 nt, synthetic construct
  source 1..22: mol_type = other RNA
tcccactgtcacatgcattact

SEQ ID NO: 21179 - RNA, 22 nt, synthetic construct
  source 1..22: mol_type = other RNA
tcccacttccccatggatggtc

SEQ ID NO: 21180 - RNA, 22 nt, synthetic construct
  source 1..22: mol_type = other RNA
tcccagacaaggaggagtagct

SEQ ID NO: 21181 - RNA, 22 nt, synthetic construct
  source 1..22: mol_type = other RNA
tcccatttgccatagtcctcac

SEQ ID NO: 21182 - RNA, 22 nt, synthetic construct
  source 1..22: mol_type = other RNA
tccccaatccacctcttgatgg

SEQ ID NO: 21183 - RNA, 22 nt, synthetic construct
  source 1..22: mol_type = other RNA
tccccacagcctcccagacaag

SEQ ID NO: 21184 - RNA, 22 nt, synthetic construct
  source 1..22: mol_type = other RNA
tccccatggatggtctagtcat

SEQ ID NO: 21185 - RNA, 22 nt, synthetic construct
  source 1..22: mol_type = other RNA
tccctcaaacagagagttccag

SEQ ID NO: 21186 - RNA, 22 nt, synthetic construct
  source 1..22: mol_type = other RNA
tccctgaggcatttaatatgtt

SEQ ID NO: 21187 - RNA, 22 nt, synthetic construct
  source 1..22: mol_type = other RNA
tccctgttgtattttatcgggt

SEQ ID NO: 21188 - RNA, 22 nt, synthetic construct
  source 1..22: mol_type = other RNA
tcctcacctatccctgttgtat

SEQ ID NO: 21189 - RNA, 22 nt, synthetic construct
  source 1..22: mol_type = other RNA
tcctccttctccccacagcctc

SEQ ID NO: 21190 - RNA, 22 nt, synthetic construct
  source 1..22: mol_type = other RNA
tcctccttgtctgggaggctgt

SEQ ID NO: 21191 - RNA, 22 nt, synthetic construct
  source 1..22: mol_type = other RNA
tcctcttcttagaaaagattac

SEQ ID NO: 21192 - RNA, 22 nt, synthetic construct
  source 1..22: mol_type = other RNA
tcctgcctggaactctctgttt

SEQ ID NO: 21193 - RNA, 22 nt, synthetic construct
  source 1..22: mol_type = other RNA
tccttaatgatagggtgtttct

SEQ ID NO: 21194 - RNA, 22 nt, synthetic construct
  source 1..22: mol_type = other RNA
tccttctccccacagcctccca

SEQ ID NO: 21195 - RNA, 22 nt, synthetic construct
  source 1..22: mol_type = other RNA
tccttgtctgggaggctgtggg

SEQ ID NO: 21196 - RNA, 22 nt, synthetic construct
  source 1..22: mol_type = other RNA
tcgggtccaactcaaccattta

SEQ ID NO: 21197 - RNA, 22 nt, synthetic construct
  source 1..22: mol_type = other RNA
tctaagaagaggacaagtatca

SEQ ID NO: 21198 - RNA, 22 nt, synthetic construct
  source 1..22: mol_type = other RNA
tctaatgaagacctgatttttt

SEQ ID NO: 21199 - RNA, 22 nt, synthetic construct
  source 1..22: mol_type = other RNA
tctagaaacaccctatcattaa

SEQ ID NO: 21200 - RNA, 22 nt, synthetic construct
  source 1..22: mol_type = other RNA
tctagagagatatatctggtca

SEQ ID NO: 21201 - RNA, 22 nt, synthetic construct
  source 1..22: mol_type = other RNA
tctagtcatgcctctcattttg

SEQ ID NO: 21202 - RNA, 22 nt, synthetic construct
  source 1..22: mol_type = other RNA
tctcacaaaatcttgccgcctt

SEQ ID NO: 21203 - RNA, 22 nt, synthetic construct
  source 1..22: mol_type = other RNA
tctcattttggaaagtactgtt

SEQ ID NO: 21204 - RNA, 22 nt, synthetic construct
  source 1..22: mol_type = other RNA
tctccaaaagtcataaagccag

SEQ ID NO: 21205 - RNA, 22 nt, synthetic construct
  source 1..22: mol_type = other RNA
tctccccacagcctcccagaca

SEQ ID NO: 21206 - RNA, 22 nt, synthetic construct
  source 1..22: mol_type = other RNA
tctctagaaacaccctatcatt

SEQ ID NO: 21207 - RNA, 22 nt, synthetic construct
  source 1..22: mol_type = other RNA
tctctctagaaacaccctatca

SEQ ID NO: 21208 - RNA, 22 nt, synthetic construct
  source 1..22: mol_type = other RNA
tctctgactttgtacctaattt

SEQ ID NO: 21209 - RNA, 22 nt, synthetic construct
  source 1..22: mol_type = other RNA
tctctgtttgagggaaggcggc

SEQ ID NO: 21210 - RNA, 22 nt, synthetic construct
  source 1..22: mol_type = other RNA
tctcttagcttttaatgttatg

SEQ ID NO: 21211 - RNA, 22 nt, synthetic construct
  source 1..22: mol_type = other RNA
tctgaaacattaggcaatatat

SEQ ID NO: 21212 - RNA, 22 nt, synthetic construct
  source 1..22: mol_type = other RNA
tctgacctgtgtgtgggttttg

SEQ ID NO: 21213 - RNA, 22 nt, synthetic construct
  source 1..22: mol_type = other RNA
tctgactttgtacctaatttca

SEQ ID NO: 21214 - RNA, 22 nt, synthetic construct
  source 1..22: mol_type = other RNA
tctgagcttctaataataagaa

SEQ ID NO: 21215 - RNA, 22 nt, synthetic construct
  source 1..22: mol_type = other RNA
tctgatacttgtcctcttctta

SEQ ID NO: 21216 - RNA, 22 nt, synthetic construct
  source 1..22: mol_type = other RNA
tctgatccctgaggcatttaat

SEQ ID NO: 21217 - RNA, 22 nt, synthetic construct
  source 1..22: mol_type = other RNA
tctgggaggctgtggggagaag

SEQ ID NO: 21218 - RNA, 22 nt, synthetic construct
  source 1..22: mol_type = other RNA
tctggtcaaggtggcctggtac

SEQ ID NO: 21219 - RNA, 22 nt, synthetic construct
  source 1..22: mol_type = other RNA
tctgtatatttagtagcactaa

SEQ ID NO: 21220 - RNA, 22 nt, synthetic construct
  source 1..22: mol_type = other RNA
tctgtcccatttgccatagtcc

SEQ ID NO: 21221 - RNA, 22 nt, synthetic construct
  source 1..22: mol_type = other RNA
tctgtgctctgatccctgaggc

SEQ ID NO: 21222 - RNA, 22 nt, synthetic construct
  source 1..22: mol_type = other RNA
tctgtttgagggaaggcggcaa

SEQ ID NO: 21223 - RNA, 22 nt, synthetic construct
  source 1..22: mol_type = other RNA
tcttagaaaagattacagtgat

SEQ ID NO: 21224 - RNA, 22 nt, synthetic construct
  source 1..22: mol_type = other RNA
tcttattattagaagctcagat

SEQ ID NO: 21225 - RNA, 22 nt, synthetic construct
  source 1..22: mol_type = other RNA
tcttcattagattccccaatcc

SEQ ID NO: 21226 - RNA, 22 nt, synthetic construct
  source 1..22: mol_type = other RNA
tcttcccacttccccatggatg

SEQ ID NO: 21227 - RNA, 22 nt, synthetic construct
  source 1..22: mol_type = other RNA
tcttcttagaaaagattacagt

SEQ ID NO: 21228 - RNA, 22 nt, synthetic construct
  source 1..22: mol_type = other RNA
tcttgatggggctagtagcctt

SEQ ID NO: 21229 - RNA, 22 nt, synthetic construct
  source 1..22: mol_type = other RNA
tcttgccgccttccctcaaaca

SEQ ID NO: 21230 - RNA, 22 nt, synthetic construct
  source 1..22: mol_type = other RNA
tcttgtatgcatttaggttttg

SEQ ID NO: 21231 - RNA, 22 nt, synthetic construct
  source 1..22: mol_type = other RNA
tctttgcatctgagcttctaat

SEQ ID NO: 21232 - RNA, 22 nt, synthetic construct
  source 1..22: mol_type = other RNA
tctttgttttttagctcatgaa

SEQ ID NO: 21233 - RNA, 22 nt, synthetic construct
  source 1..22: mol_type = other RNA
tcttttctaagaagaggacaag

SEQ ID NO: 21234 - RNA, 22 nt, synthetic construct
  source 1..22: mol_type = other RNA
tgaaaaattaatttatgcccac

SEQ ID NO: 21235 - RNA, 22 nt, synthetic construct
  source 1..22: mol_type = other RNA
tgaaaatgaagagaagtgttag

SEQ ID NO: 21236 - RNA, 22 nt, synthetic construct
  source 1..22: mol_type = other RNA
tgaaacattaggcaatatattc

SEQ ID NO: 21237 - RNA, 22 nt, synthetic construct
  source 1..22: mol_type = other RNA
tgaaattaggtacaaagtcaga

SEQ ID NO: 21238 - RNA, 22 nt, synthetic construct
  source 1..22: mol_type = other RNA
tgaagagaagtgttagtgctac

SEQ ID NO: 21239 - RNA, 22 nt, synthetic construct
  source 1..22: mol_type = other RNA
tgaatctgtgctctgatccctg

SEQ ID NO: 21240 - RNA, 22 nt, synthetic construct
  source 1..22: mol_type = other RNA
tgaatttgggctcaaccagtta

SEQ ID NO: 21241 - RNA, 22 nt, synthetic construct
  source 1..22: mol_type = other RNA
tgacagtgggatttgcgtttta

SEQ ID NO: 21242 - RNA, 22 nt, synthetic construct
  source 1..22: mol_type = other RNA
tgaccagatatatctctctaga

SEQ ID NO: 21243 - RNA, 22 nt, synthetic construct
  source 1..22: mol_type = other RNA
tgacctgtgtgtgggttttgtt

SEQ ID NO: 21244 - RNA, 22 nt, synthetic construct
  source 1..22: mol_type = other RNA
tgactagaccatccatggggaa

SEQ ID NO: 21245 - RNA, 22 nt, synthetic construct
  source 1..22: mol_type = other RNA
tgactttgtacctaatttcatg

SEQ ID NO: 21246 - RNA, 22 nt, synthetic construct
  source 1..22: mol_type = other RNA
tgacttttggagagttatttaa

SEQ ID NO: 21247 - RNA, 22 nt, synthetic construct
  source 1..22: mol_type = other RNA
tgagagcatcactgtaatcttt

SEQ ID NO: 21248 - RNA, 22 nt, synthetic construct
  source 1..22: mol_type = other RNA
tgagaggcatgactagaccatc

SEQ ID NO: 21249 - RNA, 22 nt, synthetic construct
  source 1..22: mol_type = other RNA
tgagcccaaattcaaacccagc

SEQ ID NO: 21250 - RNA, 22 nt, synthetic construct
  source 1..22: mol_type = other RNA
tgagctaaaaaacaaagaaaca

SEQ ID NO: 21251 - RNA, 22 nt, synthetic construct
  source 1..22: mol_type = other RNA
tgagcttctaataataagaaca

SEQ ID NO: 21252 - RNA, 22 nt, synthetic construct
  source 1..22: mol_type = other RNA
tgaggactatggcaaatgggac

SEQ ID NO: 21253 - RNA, 22 nt, synthetic construct
  source 1..22: mol_type = other RNA
tgaggcatttaatatgttctta

SEQ ID NO: 21254 - RNA, 22 nt, synthetic construct
  source 1..22: mol_type = other RNA
tgagggaaggcggcaagatttt

SEQ ID NO: 21255 - RNA, 22 nt, synthetic construct
  source 1..22: mol_type = other RNA
tgagttggacccgataaaatac

SEQ ID NO: 21256 - RNA, 22 nt, synthetic construct
  source 1..22: mol_type = other RNA
tgatacttgtcctcttcttaga

SEQ ID NO: 21257 - RNA, 22 nt, synthetic construct
  source 1..22: mol_type = other RNA
tgatagggtgtttctagagaga

SEQ ID NO: 21258 - RNA, 22 nt, synthetic construct
  source 1..22: mol_type = other RNA
tgatcaaatggagtaatgcatg

SEQ ID NO: 21259 - RNA, 22 nt, synthetic construct
  source 1..22: mol_type = other RNA
tgatcactaaaaggcagctact

SEQ ID NO: 21260 - RNA, 22 nt, synthetic construct
  source 1..22: mol_type = other RNA
tgatcataatggaaagtatgtt

SEQ ID NO: 21261 - RNA, 22 nt, synthetic construct
  source 1..22: mol_type = other RNA
tgatcatgtaccctgaatataa

SEQ ID NO: 21262 - RNA, 22 nt, synthetic construct
  source 1..22: mol_type = other RNA
tgatccctgaggcatttaatat

SEQ ID NO: 21263 - RNA, 22 nt, synthetic construct
  source 1..22: mol_type = other RNA
tgatgctctcacaaaatcttgc

SEQ ID NO: 21264 - RNA, 22 nt, synthetic construct
  source 1..22: mol_type = other RNA
tgatggggctagtagcctttcc

SEQ ID NO: 21265 - RNA, 22 nt, synthetic construct
  source 1..22: mol_type = other RNA
tgattgctgtaaactagccagg

SEQ ID NO: 21266 - RNA, 22 nt, synthetic construct
  source 1..22: mol_type = other RNA
tgcaaagagctctcttagcttt

SEQ ID NO: 21267 - RNA, 22 nt, synthetic construct
  source 1..22: mol_type = other RNA
tgcatacaagagctggcaaata

SEQ ID NO: 21268 - RNA, 22 nt, synthetic construct
  source 1..22: mol_type = other RNA
tgcatctgagcttctaataata

SEQ ID NO: 21269 - RNA, 22 nt, synthetic construct
  source 1..22: mol_type = other RNA
tgcatgtgacagtgggatttgc

SEQ ID NO: 21270 - RNA, 22 nt, synthetic construct
  source 1..22: mol_type = other RNA
tgcattactccatttgatcata

SEQ ID NO: 21271 - RNA, 22 nt, synthetic construct
  source 1..22: mol_type = other RNA
tgcatttaggttttgtttcttt

SEQ ID NO: 21272 - RNA, 22 nt, synthetic construct
  source 1..22: mol_type = other RNA
tgccagacccctctctgacttt

SEQ ID NO: 21273 - RNA, 22 nt, synthetic construct
  source 1..22: mol_type = other RNA
tgccagctcttgtatgcattta

SEQ ID NO: 21274 - RNA, 22 nt, synthetic construct
  source 1..22: mol_type = other RNA
tgccatagtcctcacctatccc

SEQ ID NO: 21275 - RNA, 22 nt, synthetic construct
  source 1..22: mol_type = other RNA
tgcccacagtaaaacaaaaaca

SEQ ID NO: 21276 - RNA, 22 nt, synthetic construct
  source 1..22: mol_type = other RNA
tgccgccttccctcaaacagag

SEQ ID NO: 21277 - RNA, 22 nt, synthetic construct
  source 1..22: mol_type = other RNA
tgcctaatgtttcagaaacagt

SEQ ID NO: 21278 - RNA, 22 nt, synthetic construct
  source 1..22: mol_type = other RNA
tgcctcagggatcagagcacag

SEQ ID NO: 21279 - RNA, 22 nt, synthetic construct
  source 1..22: mol_type = other RNA
tgcctctcattttggaaagtac

SEQ ID NO: 21280 - RNA, 22 nt, synthetic construct
  source 1..22: mol_type = other RNA
tgcctggaactctctgtttgag

SEQ ID NO: 21281 - RNA, 22 nt, synthetic construct
  source 1..22: mol_type = other RNA
tgccttttagtgatcatgtacc

SEQ ID NO: 21282 - RNA, 22 nt, synthetic construct
  source 1..22: mol_type = other RNA
tgcgttttaattagcatccaca

SEQ ID NO: 21283 - RNA, 22 nt, synthetic construct
  source 1..22: mol_type = other RNA
tgctaattaaaacgcaaatccc

SEQ ID NO: 21284 - RNA, 22 nt, synthetic construct
  source 1..22: mol_type = other RNA
tgctactaaatatacagattga

SEQ ID NO: 21285 - RNA, 22 nt, synthetic construct
  source 1..22: mol_type = other RNA
tgctctcacaaaatcttgccgc

SEQ ID NO: 21286 - RNA, 22 nt, synthetic construct
  source 1..22: mol_type = other RNA
tgctctgatccctgaggcattt

SEQ ID NO: 21287 - RNA, 22 nt, synthetic construct
  source 1..22: mol_type = other RNA
tgctgtaaactagccaggttgg

SEQ ID NO: 21288 - RNA, 22 nt, synthetic construct
  source 1..22: mol_type = other RNA
tggaaagtactgtttctgaaac

SEQ ID NO: 21289 - RNA, 22 nt, synthetic construct
  source 1..22: mol_type = other RNA
tggaaagtatgttctgtcccat

SEQ ID NO: 21290 - RNA, 22 nt, synthetic construct
  source 1..22: mol_type = other RNA
tggaactctctgtttgagggaa

SEQ ID NO: 21291 - RNA, 22 nt, synthetic construct
  source 1..22: mol_type = other RNA
tggaagcttaaataactctcca

SEQ ID NO: 21292 - RNA, 22 nt, synthetic construct
  source 1..22: mol_type = other RNA
tggacccgataaaatacaacag

SEQ ID NO: 21293 - RNA, 22 nt, synthetic construct
  source 1..22: mol_type = other RNA
tggagagttatttaagcttcca

SEQ ID NO: 21294 - RNA, 22 nt, synthetic construct
  source 1..22: mol_type = other RNA
tggagtaatgcatgtgacagtg

SEQ ID NO: 21295 - RNA, 22 nt, synthetic construct
  source 1..22: mol_type = other RNA
tggatgctaattaaaacgcaaa

SEQ ID NO: 21296 - RNA, 22 nt, synthetic construct
  source 1..22: mol_type = other RNA
tggatggtctagtcatgcctct

SEQ ID NO: 21297 - RNA, 22 nt, synthetic construct
  source 1..22: mol_type = other RNA
tggattggggaatctaatgaag

SEQ ID NO: 21298 - RNA, 22 nt, synthetic construct
  source 1..22: mol_type = other RNA
tggcaaataccttaaatggttg

SEQ ID NO: 21299 - RNA, 22 nt, synthetic construct
  source 1..22: mol_type = other RNA
tggcaaatgggacagaacatac

SEQ ID NO: 21300 - RNA, 22 nt, synthetic construct
  source 1..22: mol_type = other RNA
tggcctggtactcctccttctc

SEQ ID NO: 21301 - RNA, 22 nt, synthetic construct
  source 1..22: mol_type = other RNA
tggctagtttacagcaatcacc

SEQ ID NO: 21302 - RNA, 22 nt, synthetic construct
  source 1..22: mol_type = other RNA
tggctttatgacttttggagag

SEQ ID NO: 21303 - RNA, 22 nt, synthetic construct
  source 1..22: mol_type = other RNA
tgggaatatattgcctaatgtt

SEQ ID NO: 21304 - RNA, 22 nt, synthetic construct
  source 1..22: mol_type = other RNA
tgggacagaacatactttccat

SEQ ID NO: 21305 - RNA, 22 nt, synthetic construct
  source 1..22: mol_type = other RNA
tgggaggctgtggggagaagga

SEQ ID NO: 21306 - RNA, 22 nt, synthetic construct
  source 1..22: mol_type = other RNA
tgggatttgcgttttaattagc

SEQ ID NO: 21307 - RNA, 22 nt, synthetic construct
  source 1..22: mol_type = other RNA
tgggcataaattaatttttcag

SEQ ID NO: 21308 - RNA, 22 nt, synthetic construct
  source 1..22: mol_type = other RNA
tgggctcaaccagttactggct

SEQ ID NO: 21309 - RNA, 22 nt, synthetic construct
  source 1..22: mol_type = other RNA
tggggaagtgggaagaaaatat

SEQ ID NO: 21310 - RNA, 22 nt, synthetic construct
  source 1..22: mol_type = other RNA
tggggaatctaatgaagacctg

SEQ ID NO: 21311 - RNA, 22 nt, synthetic construct
  source 1..22: mol_type = other RNA
tggggagaaggaggagtaccag

SEQ ID NO: 21312 - RNA, 22 nt, synthetic construct
  source 1..22: mol_type = other RNA
tggggctagtagcctttcctta

SEQ ID NO: 21313 - RNA, 22 nt, synthetic construct
  source 1..22: mol_type = other RNA
tgggtttgaatttgggctcaac

SEQ ID NO: 21314 - RNA, 22 nt, synthetic construct
  source 1..22: mol_type = other RNA
tgggttttgtttttgttttact

SEQ ID NO: 21315 - RNA, 22 nt, synthetic construct
  source 1..22: mol_type = other RNA
tggtactcctccttctccccac

SEQ ID NO: 21316 - RNA, 22 nt, synthetic construct
  source 1..22: mol_type = other RNA
tggtcaaggtggcctggtactc

SEQ ID NO: 21317 - RNA, 22 nt, synthetic construct
  source 1..22: mol_type = other RNA
tggtctagtcatgcctctcatt

SEQ ID NO: 21318 - RNA, 22 nt, synthetic construct
  source 1..22: mol_type = other RNA
tggttgagcccaaattcaaacc

SEQ ID NO: 21319 - RNA, 22 nt, synthetic construct
  source 1..22: mol_type = other RNA
tggttgagttggacccgataaa

SEQ ID NO: 21320 - RNA, 22 nt, synthetic construct
  source 1..22: mol_type = other RNA
tgtaaactagccaggttgggaa

SEQ ID NO: 21321 - RNA, 22 nt, synthetic construct
  source 1..22: mol_type = other RNA
tgtaatcttttctaagaagagg

SEQ ID NO: 21322 - RNA, 22 nt, synthetic construct
  source 1..22: mol_type = other RNA
tgtaccctgaatataagtgtat

SEQ ID NO: 21323 - RNA, 22 nt, synthetic construct
  source 1..22: mol_type = other RNA
tgtacctaatttcatgagctaa

SEQ ID NO: 21324 - RNA, 22 nt, synthetic construct
  source 1..22: mol_type = other RNA
tgtatatttagtagcactaaca

SEQ ID NO: 21325 - RNA, 22 nt, synthetic construct
  source 1..22: mol_type = other RNA
tgtatgcatttaggttttgttt

SEQ ID NO: 21326 - RNA, 22 nt, synthetic construct
  source 1..22: mol_type = other RNA
tgtattttatcgggtccaactc

SEQ ID NO: 21327 - RNA, 22 nt, synthetic construct
  source 1..22: mol_type = other RNA
tgtcaatctgtatatttagtag

SEQ ID NO: 21328 - RNA, 22 nt, synthetic construct
  source 1..22: mol_type = other RNA
tgtcacatgcattactccattt

SEQ ID NO: 21329 - RNA, 22 nt, synthetic construct
  source 1..22: mol_type = other RNA
tgtcccatttgccatagtcctc

SEQ ID NO: 21330 - RNA, 22 nt, synthetic construct
  source 1..22: mol_type = other RNA
tgtcctcttcttagaaaagatt

SEQ ID NO: 21331 - RNA, 22 nt, synthetic construct
  source 1..22: mol_type = other RNA
tgtctgatacttgtcctcttct

SEQ ID NO: 21332 - RNA, 22 nt, synthetic construct
  source 1..22: mol_type = other RNA
tgtctgggaggctgtggggaga

SEQ ID NO: 21333 - RNA, 22 nt, synthetic construct
  source 1..22: mol_type = other RNA
tgtgacagtgggatttgcgttt

SEQ ID NO: 21334 - RNA, 22 nt, synthetic construct
  source 1..22: mol_type = other RNA
tgtgagagcatcactgtaatct

SEQ ID NO: 21335 - RNA, 22 nt, synthetic construct
  source 1..22: mol_type = other RNA
tgtgctctgatccctgaggcat

SEQ ID NO: 21336 - RNA, 22 nt, synthetic construct
  source 1..22: mol_type = other RNA
tgtggatgctaattaaaacgca

SEQ ID NO: 21337 - RNA, 22 nt, synthetic construct
  source 1..22: mol_type = other RNA
tgtgggcataaattaatttttc

SEQ ID NO: 21338 - RNA, 22 nt, synthetic construct
  source 1..22: mol_type = other RNA
tgtggggagaaggaggagtacc

SEQ ID NO: 21339 - RNA, 22 nt, synthetic construct
  source 1..22: mol_type = other RNA
tgtgggttttgtttttgtttta

SEQ ID NO: 21340 - RNA, 22 nt, synthetic construct
  source 1..22: mol_type = other RNA
tgtgtgggttttgtttttgttt

SEQ ID NO: 21341 - RNA, 22 nt, synthetic construct
  source 1..22: mol_type = other RNA
tgtgtgtgggttttgtttttgt

SEQ ID NO: 21342 - RNA, 22 nt, synthetic construct
  source 1..22: mol_type = other RNA
tgttagtgctactaaatataca

SEQ ID NO: 21343 - RNA, 22 nt, synthetic construct
  source 1..22: mol_type = other RNA
tgttctgtcccatttgccatag

SEQ ID NO: 21344 - RNA, 22 nt, synthetic construct
  source 1..22: mol_type = other RNA
tgttcttattattagaagctca

SEQ ID NO: 21345 - RNA, 22 nt, synthetic construct
  source 1..22: mol_type = other RNA
tgttgtattttatcgggtccaa

SEQ ID NO: 21346 - RNA, 22 nt, synthetic construct
  source 1..22: mol_type = other RNA
tgtttcagaaacagtactttcc

SEQ ID NO: 21347 - RNA, 22 nt, synthetic construct
  source 1..22: mol_type = other RNA
tgtttctagagagatatatctg

SEQ ID NO: 21348 - RNA, 22 nt, synthetic construct
  source 1..22: mol_type = other RNA
tgtttctgaaacattaggcaat

SEQ ID NO: 21349 - RNA, 22 nt, synthetic construct
  source 1..22: mol_type = other RNA
tgtttctttgttttttagctca

SEQ ID NO: 21350 - RNA, 22 nt, synthetic construct
  source 1..22: mol_type = other RNA
tgtttgagggaaggcggcaaga

SEQ ID NO: 21351 - RNA, 22 nt, synthetic construct
  source 1..22: mol_type = other RNA
tgttttactgtgggcataaatt

SEQ ID NO: 21352 - RNA, 22 nt, synthetic construct
  source 1..22: mol_type = other RNA
tgtttttgttttactgtgggca

SEQ ID NO: 21353 - RNA, 22 nt, synthetic construct
  source 1..22: mol_type = other RNA
ttaaaacgcaaatcccactgtc

SEQ ID NO: 21354 - RNA, 22 nt, synthetic construct
  source 1..22: mol_type = other RNA
ttaaaagctaagagagctcttt

SEQ ID NO: 21355 - RNA, 22 nt, synthetic construct
  source 1..22: mol_type = other RNA
ttaaataactctccaaaagtca

SEQ ID NO: 21356 - RNA, 22 nt, synthetic construct
  source 1..22: mol_type = other RNA
ttaaatacacttatattcaggg

SEQ ID NO: 21357 - RNA, 22 nt, synthetic construct
  source 1..22: mol_type = other RNA
ttaaatgcctcagggatcagag

SEQ ID NO: 21358 - RNA, 22 nt, synthetic construct
  source 1..22: mol_type = other RNA
ttaaatggttgagttggacccg

SEQ ID NO: 21359 - RNA, 22 nt, synthetic construct
  source 1..22: mol_type = other RNA
ttaagcttccaaaacttaactg

SEQ ID NO: 21360 - RNA, 22 nt, synthetic construct
  source 1..22: mol_type = other RNA
ttaaggaaaggctactagcccc

SEQ ID NO: 21361 - RNA, 22 nt, synthetic construct
  source 1..22: mol_type = other RNA
ttaaggtatttgccagctcttg

SEQ ID NO: 21362 - RNA, 22 nt, synthetic construct
  source 1..22: mol_type = other RNA
ttaatgatagggtgtttctaga

SEQ ID NO: 21363 - RNA, 22 nt, synthetic construct
  source 1..22: mol_type = other RNA
ttaattagcatccacaggtgat

SEQ ID NO: 21364 - RNA, 22 nt, synthetic construct
  source 1..22: mol_type = other RNA
ttaatttatgcccacagtaaaa

SEQ ID NO: 21365 - RNA, 22 nt, synthetic construct
  source 1..22: mol_type = other RNA
ttacagcaatcacctgtggatg

SEQ ID NO: 21366 - RNA, 22 nt, synthetic construct
  source 1..22: mol_type = other RNA
ttacagtgatgctctcacaaaa

SEQ ID NO: 21367 - RNA, 22 nt, synthetic construct
  source 1..22: mol_type = other RNA
ttactccatttgatcataatgg

SEQ ID NO: 21368 - RNA, 22 nt, synthetic construct
  source 1..22: mol_type = other RNA
ttactggctttatgacttttgg

SEQ ID NO: 21369 - RNA, 22 nt, synthetic construct
  source 1..22: mol_type = other RNA
ttactgtgggcataaattaatt

SEQ ID NO: 21370 - RNA, 22 nt, synthetic construct
  source 1..22: mol_type = other RNA
ttagaaaagattacagtgatgc

SEQ ID NO: 21371 - RNA, 22 nt, synthetic construct
  source 1..22: mol_type = other RNA
ttagaagctcagatgcaaagag

SEQ ID NO: 21372 - RNA, 22 nt, synthetic construct
  source 1..22: mol_type = other RNA
ttagattccccaatccacctct

SEQ ID NO: 21373 - RNA, 22 nt, synthetic construct
  source 1..22: mol_type = other RNA
ttagcatccacaggtgattgct

SEQ ID NO: 21374 - RNA, 22 nt, synthetic construct
  source 1..22: mol_type = other RNA
ttagctcatgaaattaggtaca

SEQ ID NO: 21375 - RNA, 22 nt, synthetic construct
  source 1..22: mol_type = other RNA
ttaggcaatatattcccaacct

SEQ ID NO: 21376 - RNA, 22 nt, synthetic construct
  source 1..22: mol_type = other RNA
ttaggtacaaagtcagagaggg

SEQ ID NO: 21377 - RNA, 22 nt, synthetic construct
  source 1..22: mol_type = other RNA
ttagtagcactaacacttctct

SEQ ID NO: 21378 - RNA, 22 nt, synthetic construct
  source 1..22: mol_type = other RNA
ttagtgatcatgtaccctgaat

SEQ ID NO: 21379 - RNA, 22 nt, synthetic construct
  source 1..22: mol_type = other RNA
ttagtgctactaaatatacaga

SEQ ID NO: 21380 - RNA, 22 nt, synthetic construct
  source 1..22: mol_type = other RNA
ttatatgccagacccctctctg

SEQ ID NO: 21381 - RNA, 22 nt, synthetic construct
  source 1..22: mol_type = other RNA
ttatattcagggtacatgatca

SEQ ID NO: 21382 - RNA, 22 nt, synthetic construct
  source 1..22: mol_type = other RNA
ttatcgggtccaactcaaccat

SEQ ID NO: 21383 - RNA, 22 nt, synthetic construct
  source 1..22: mol_type = other RNA
ttatgacttttggagagttatt

SEQ ID NO: 21384 - RNA, 22 nt, synthetic construct
  source 1..22: mol_type = other RNA
ttatgatcaaatggagtaatgc

SEQ ID NO: 21385 - RNA, 22 nt, synthetic construct
  source 1..22: mol_type = other RNA
ttatgcccacagtaaaacaaaa

SEQ ID NO: 21386 - RNA, 22 nt, synthetic construct
  source 1..22: mol_type = other RNA
ttattagaagctcagatgcaaa

SEQ ID NO: 21387 - RNA, 22 nt, synthetic construct
  source 1..22: mol_type = other RNA
ttattattagaagctcagatgc

SEQ ID NO: 21388 - RNA, 22 nt, synthetic construct
  source 1..22: mol_type = other RNA
ttcaaacccagcctgtctgata

SEQ ID NO: 21389 - RNA, 22 nt, synthetic construct
  source 1..22: mol_type = other RNA
ttcagaaacagtactttccaaa

SEQ ID NO: 21390 - RNA, 22 nt, synthetic construct
  source 1..22: mol_type = other RNA
ttcagggtacatgatcactaaa

SEQ ID NO: 21391 - RNA, 22 nt, synthetic construct
  source 1..22: mol_type = other RNA
ttcagttaagttttggaagctt

SEQ ID NO: 21392 - RNA, 22 nt, synthetic construct
  source 1..22: mol_type = other RNA
ttcatcctgcctggaactctct

SEQ ID NO: 21393 - RNA, 22 nt, synthetic construct
  source 1..22: mol_type = other RNA
ttcatgagctaaaaaacaaaga

SEQ ID NO: 21394 - RNA, 22 nt, synthetic construct
  source 1..22: mol_type = other RNA
ttcattagattccccaatccac

SEQ ID NO: 21395 - RNA, 22 nt, synthetic construct
  source 1..22: mol_type = other RNA
ttcattgaaaatgaagagaagt

SEQ ID NO: 21396 - RNA, 22 nt, synthetic construct
  source 1..22: mol_type = other RNA
ttccaaaatgagaggcatgact

SEQ ID NO: 21397 - RNA, 22 nt, synthetic construct
  source 1..22: mol_type = other RNA
ttccaggcaggatgaatctgtg

SEQ ID NO: 21398 - RNA, 22 nt, synthetic construct
  source 1..22: mol_type = other RNA
ttccattatgatcaaatggagt

SEQ ID NO: 21399 - RNA, 22 nt, synthetic construct
  source 1..22: mol_type = other RNA
ttcccaacctggctagtttaca

SEQ ID NO: 21400 - RNA, 22 nt, synthetic construct
  source 1..22: mol_type = other RNA
ttcccacttccccatggatggt

SEQ ID NO: 21401 - RNA, 22 nt, synthetic construct
  source 1..22: mol_type = other RNA
ttccccaatccacctcttgatg

SEQ ID NO: 21402 - RNA, 22 nt, synthetic construct
  source 1..22: mol_type = other RNA
ttccccatggatggtctagtca

SEQ ID NO: 21403 - RNA, 22 nt, synthetic construct
  source 1..22: mol_type = other RNA
ttccctcaaacagagagttcca

SEQ ID NO: 21404 - RNA, 22 nt, synthetic construct
  source 1..22: mol_type = other RNA
ttccttaatgatagggtgtttc

SEQ ID NO: 21405 - RNA, 22 nt, synthetic construct
  source 1..22: mol_type = other RNA
ttctaagaagaggacaagtatc

SEQ ID NO: 21406 - RNA, 22 nt, synthetic construct
  source 1..22: mol_type = other RNA
ttctagagagatatatctggtc

SEQ ID NO: 21407 - RNA, 22 nt, synthetic construct
  source 1..22: mol_type = other RNA
ttctccccacagcctcccagac

SEQ ID NO: 21408 - RNA, 22 nt, synthetic construct
  source 1..22: mol_type = other RNA
ttctgaaacattaggcaatata

SEQ ID NO: 21409 - RNA, 22 nt, synthetic construct
  source 1..22: mol_type = other RNA
ttctgtcccatttgccatagtc

SEQ ID NO: 21410 - RNA, 22 nt, synthetic construct
  source 1..22: mol_type = other RNA
ttcttagaaaagattacagtga

SEQ ID NO: 21411 - RNA, 22 nt, synthetic construct
  source 1..22: mol_type = other RNA
ttcttattattagaagctcaga

SEQ ID NO: 21412 - RNA, 22 nt, synthetic construct
  source 1..22: mol_type = other RNA
ttcttcccacttccccatggat

SEQ ID NO: 21413 - RNA, 22 nt, synthetic construct
  source 1..22: mol_type = other RNA
ttctttgttttttagctcatga

SEQ ID NO: 21414 - RNA, 22 nt, synthetic construct
  source 1..22: mol_type = other RNA
ttgaaaatgaagagaagtgtta

SEQ ID NO: 21415 - RNA, 22 nt, synthetic construct
  source 1..22: mol_type = other RNA
ttgaatttgggctcaaccagtt

SEQ ID NO: 21416 - RNA, 22 nt, synthetic construct
  source 1..22: mol_type = other RNA
ttgaccagatatatctctctag

SEQ ID NO: 21417 - RNA, 22 nt, synthetic construct
  source 1..22: mol_type = other RNA
ttgagcccaaattcaaacccag

SEQ ID NO: 21418 - RNA, 22 nt, synthetic construct
  source 1..22: mol_type = other RNA
ttgagggaaggcggcaagattt

SEQ ID NO: 21419 - RNA, 22 nt, synthetic construct
  source 1..22: mol_type = other RNA
ttgagttggacccgataaaata

SEQ ID NO: 21420 - RNA, 22 nt, synthetic construct
  source 1..22: mol_type = other RNA
ttgatcataatggaaagtatgt

SEQ ID NO: 21421 - RNA, 22 nt, synthetic construct
  source 1..22: mol_type = other RNA
ttgatggggctagtagcctttc

SEQ ID NO: 21422 - RNA, 22 nt, synthetic construct
  source 1..22: mol_type = other RNA
ttgcatctgagcttctaataat

SEQ ID NO: 21423 - RNA, 22 nt, synthetic construct
  source 1..22: mol_type = other RNA
ttgccagctcttgtatgcattt

SEQ ID NO: 21424 - RNA, 22 nt, synthetic construct
  source 1..22: mol_type = other RNA
ttgccatagtcctcacctatcc

SEQ ID NO: 21425 - RNA, 22 nt, synthetic construct
  source 1..22: mol_type = other RNA
ttgccgccttccctcaaacaga

SEQ ID NO: 21426 - RNA, 22 nt, synthetic construct
  source 1..22: mol_type = other RNA
ttgcctaatgtttcagaaacag

SEQ ID NO: 21427 - RNA, 22 nt, synthetic construct
  source 1..22: mol_type = other RNA
ttgcgttttaattagcatccac

SEQ ID NO: 21428 - RNA, 22 nt, synthetic construct
  source 1..22: mol_type = other RNA
ttgctgtaaactagccaggttg

SEQ ID NO: 21429 - RNA, 22 nt, synthetic construct
  source 1..22: mol_type = other RNA
ttggaaagtactgtttctgaaa

SEQ ID NO: 21430 - RNA, 22 nt, synthetic construct
  source 1..22: mol_type = other RNA
ttggaagcttaaataactctcc

SEQ ID NO: 21431 - RNA, 22 nt, synthetic construct
  source 1..22: mol_type = other RNA
ttggacccgataaaatacaaca

SEQ ID NO: 21432 - RNA, 22 nt, synthetic construct
  source 1..22: mol_type = other RNA
ttggagagttatttaagcttcc

SEQ ID NO: 21433 - RNA, 22 nt, synthetic construct
  source 1..22: mol_type = other RNA
ttgggaatatattgcctaatgt

SEQ ID NO: 21434 - RNA, 22 nt, synthetic construct
  source 1..22: mol_type = other RNA
ttgggctcaaccagttactggc

SEQ ID NO: 21435 - RNA, 22 nt, synthetic construct
  source 1..22: mol_type = other RNA
ttggggaatctaatgaagacct

SEQ ID NO: 21436 - RNA, 22 nt, synthetic construct
  source 1..22: mol_type = other RNA
ttgtacctaatttcatgagcta

SEQ ID NO: 21437 - RNA, 22 nt, synthetic construct
  source 1..22: mol_type = other RNA
ttgtatgcatttaggttttgtt

SEQ ID NO: 21438 - RNA, 22 nt, synthetic construct
  source 1..22: mol_type = other RNA
ttgtattttatcgggtccaact

SEQ ID NO: 21439 - RNA, 22 nt, synthetic construct
  source 1..22: mol_type = other RNA
ttgtcctcttcttagaaaagat

SEQ ID NO: 21440 - RNA, 22 nt, synthetic construct
  source 1..22: mol_type = other RNA
ttgtctgggaggctgtggggag

SEQ ID NO: 21441 - RNA, 22 nt, synthetic construct
  source 1..22: mol_type = other RNA
ttgtgagagcatcactgtaatc

SEQ ID NO: 21442 - RNA, 22 nt, synthetic construct
  source 1..22: mol_type = other RNA
ttgtttctttgttttttagctc

SEQ ID NO: 21443 - RNA, 22 nt, synthetic construct
  source 1..22: mol_type = other RNA
ttgttttactgtgggcataaat

SEQ ID NO: 21444 - RNA, 22 nt, synthetic construct
  source 1..22: mol_type = other RNA
ttgtttttgttttactgtgggc

SEQ ID NO: 21445 - RNA, 22 nt, synthetic construct
  source 1..22: mol_type = other RNA
tttaagcttccaaaacttaact

SEQ ID NO: 21446 - RNA, 22 nt, synthetic construct
  source 1..22: mol_type = other RNA
tttaaggtatttgccagctctt

SEQ ID NO: 21447 - RNA, 22 nt, synthetic construct
  source 1..22: mol_type = other RNA
tttaattagcatccacaggtga

SEQ ID NO: 21448 - RNA, 22 nt, synthetic construct
  source 1..22: mol_type = other RNA
tttacagcaatcacctgtggat

SEQ ID NO: 21449 - RNA, 22 nt, synthetic construct
  source 1..22: mol_type = other RNA
tttactgtgggcataaattaat

SEQ ID NO: 21450 - RNA, 22 nt, synthetic construct
  source 1..22: mol_type = other RNA
tttagctcatgaaattaggtac

SEQ ID NO: 21451 - RNA, 22 nt, synthetic construct
  source 1..22: mol_type = other RNA
tttagtagcactaacacttctc

SEQ ID NO: 21452 - RNA, 22 nt, synthetic construct
  source 1..22: mol_type = other RNA
tttagtgatcatgtaccctgaa

SEQ ID NO: 21453 - RNA, 22 nt, synthetic construct
  source 1..22: mol_type = other RNA
tttatatgccagacccctctct

SEQ ID NO: 21454 - RNA, 22 nt, synthetic construct
  source 1..22: mol_type = other RNA
tttatcgggtccaactcaacca

SEQ ID NO: 21455 - RNA, 22 nt, synthetic construct
  source 1..22: mol_type = other RNA
tttatgacttttggagagttat

SEQ ID NO: 21456 - RNA, 22 nt, synthetic construct
  source 1..22: mol_type = other RNA
tttatgcccacagtaaaacaaa

SEQ ID NO: 21457 - RNA, 22 nt, synthetic construct
  source 1..22: mol_type = other RNA
tttcagaaacagtactttccaa

SEQ ID NO: 21458 - RNA, 22 nt, synthetic construct
  source 1..22: mol_type = other RNA
tttcagttaagttttggaagct

SEQ ID NO: 21459 - RNA, 22 nt, synthetic construct
  source 1..22: mol_type = other RNA
tttcatgagctaaaaaacaaag

SEQ ID NO: 21460 - RNA, 22 nt, synthetic construct
  source 1..22: mol_type = other RNA
tttcattgaaaatgaagagaag

SEQ ID NO: 21461 - RNA, 22 nt, synthetic construct
  source 1..22: mol_type = other RNA
tttccaaaatgagaggcatgac

SEQ ID NO: 21462 - RNA, 22 nt, synthetic construct
  source 1..22: mol_type = other RNA
tttccattatgatcaaatggag

SEQ ID NO: 21463 - RNA, 22 nt, synthetic construct
  source 1..22: mol_type = other RNA
tttccttaatgatagggtgttt

SEQ ID NO: 21464 - RNA, 22 nt, synthetic construct
  source 1..22: mol_type = other RNA
tttctaagaagaggacaagtat

SEQ ID NO: 21465 - RNA, 22 nt, synthetic construct
  source 1..22: mol_type = other RNA
tttctagagagatatatctggt

SEQ ID NO: 21466 - RNA, 22 nt, synthetic construct
  source 1..22: mol_type = other RNA
tttctgaaacattaggcaatat

SEQ ID NO: 21467 - RNA, 22 nt, synthetic construct
  source 1..22: mol_type = other RNA
tttcttcccacttccccatgga

SEQ ID NO: 21468 - RNA, 22 nt, synthetic construct
  source 1..22: mol_type = other RNA
tttctttgttttttagctcatg

SEQ ID NO: 21469 - RNA, 22 nt, synthetic construct
  source 1..22: mol_type = other RNA
tttgaatttgggctcaaccagt

SEQ ID NO: 21470 - RNA, 22 nt, synthetic construct
  source 1..22: mol_type = other RNA
tttgagggaaggcggcaagatt

SEQ ID NO: 21471 - RNA, 22 nt, synthetic construct
  source 1..22: mol_type = other RNA
tttgatcataatggaaagtatg

SEQ ID NO: 21472 - RNA, 22 nt, synthetic construct
  source 1..22: mol_type = other RNA
tttgcatctgagcttctaataa

SEQ ID NO: 21473 - RNA, 22 nt, synthetic construct
  source 1..22: mol_type = other RNA
tttgccagctcttgtatgcatt

SEQ ID NO: 21474 - RNA, 22 nt, synthetic construct
  source 1..22: mol_type = other RNA
tttgccatagtcctcacctatc

SEQ ID NO: 21475 - RNA, 22 nt, synthetic construct
  source 1..22: mol_type = other RNA
tttgcgttttaattagcatcca

SEQ ID NO: 21476 - RNA, 22 nt, synthetic construct
  source 1..22: mol_type = other RNA
tttggaaagtactgtttctgaa

SEQ ID NO: 21477 - RNA, 22 nt, synthetic construct
  source 1..22: mol_type = other RNA
tttggaagcttaaataactctc

SEQ ID NO: 21478 - RNA, 22 nt, synthetic construct
  source 1..22: mol_type = other RNA
tttggagagttatttaagcttc

SEQ ID NO: 21479 - RNA, 22 nt, synthetic construct
  source 1..22: mol_type = other RNA
tttgggctcaaccagttactgg

SEQ ID NO: 21480 - RNA, 22 nt, synthetic construct
  source 1..22: mol_type = other RNA
tttgtacctaatttcatgagct

SEQ ID NO: 21481 - RNA, 22 nt, synthetic construct
  source 1..22: mol_type = other RNA
tttgtgagagcatcactgtaat

SEQ ID NO: 21482 - RNA, 22 nt, synthetic construct
  source 1..22: mol_type = other RNA
tttgttttactgtgggcataaa

SEQ ID NO: 21483 - RNA, 22 nt, synthetic construct
  source 1..22: mol_type = other RNA
tttgtttttgttttactgtggg

SEQ ID NO: 21484 - RNA, 22 nt, synthetic construct
  source 1..22: mol_type = other RNA
ttttaattagcatccacaggtg

SEQ ID NO: 21485 - RNA, 22 nt, synthetic construct
  source 1..22: mol_type = other RNA
ttttactgtgggcataaattaa

SEQ ID NO: 21486 - RNA, 22 nt, synthetic construct
  source 1..22: mol_type = other RNA
ttttagctcatgaaattaggta

SEQ ID NO: 21487 - RNA, 22 nt, synthetic construct
  source 1..22: mol_type = other RNA
ttttagtgatcatgtaccctga

SEQ ID NO: 21488 - RNA, 22 nt, synthetic construct
  source 1..22: mol_type = other RNA
ttttatcgggtccaactcaacc

SEQ ID NO: 21489 - RNA, 22 nt, synthetic construct
  source 1..22: mol_type = other RNA
ttttcagttaagttttggaagc

SEQ ID NO: 21490 - RNA, 22 nt, synthetic construct
  source 1..22: mol_type = other RNA
ttttctaagaagaggacaagta

SEQ ID NO: 21491 - RNA, 22 nt, synthetic construct
  source 1..22: mol_type = other RNA
ttttcttcccacttccccatgg

SEQ ID NO: 21492 - RNA, 22 nt, synthetic construct
  source 1..22: mol_type = other RNA
ttttggaaagtactgtttctga

SEQ ID NO: 21493 - RNA, 22 nt, synthetic construct
  source 1..22: mol_type = other RNA
ttttggaagcttaaataactct

SEQ ID NO: 21494 - RNA, 22 nt, synthetic construct
  source 1..22: mol_type = other RNA
ttttggagagttatttaagctt

SEQ ID NO: 21495 - RNA, 22 nt, synthetic construct
  source 1..22: mol_type = other RNA
ttttgtgagagcatcactgtaa

SEQ ID NO: 21496 - RNA, 22 nt, synthetic construct
  source 1..22: mol_type = other RNA
ttttgttttactgtgggcataa

SEQ ID NO: 21497 - RNA, 22 nt, synthetic construct
  source 1..22: mol_type = other RNA
ttttgtttttgttttactgtgg

SEQ ID NO: 21498 - RNA, 22 nt, synthetic construct
  source 1..22: mol_type = other RNA
tttttagctcatgaaattaggt

SEQ ID NO: 21499 - RNA, 22 nt, synthetic construct
  source 1..22: mol_type = other RNA
tttttcagttaagttttggaag

SEQ ID NO: 21500 - RNA, 22 nt, synthetic construct
  source 1..22: mol_type = other RNA
tttttgttttactgtgggcata

SEQ ID NO: 21501 - RNA, 22 nt, synthetic construct
  source 1..22: mol_type = other RNA
ttttttagctcatgaaattagg

SEQ ID NO: 21502 - RNA, 20 nt, synthetic construct
  source 1..20: mol_type = other RNA
aaacaacaaaacctctttat

SEQ ID NO: 21503 - RNA, 20 nt, synthetic construct
  source 1..20: mol_type = other RNA
aaagaggttttgttgtttgg

SEQ ID NO: 21504 - RNA, 20 nt, synthetic construct
  source 1..20: mol_type = other RNA
aaataaagaggttttgttgt

SEQ ID NO: 21505 - RNA, 20 nt, synthetic construct
  source 1..20: mol_type = other RNA
aacaacaaaacctctttatt

SEQ ID NO: 21506 - RNA, 20 nt, synthetic construct
  source 1..20: mol_type = other RNA
aacccaaggtatgttcttac

SEQ ID NO: 21507 - RNA, 20 nt, synthetic construct
  source 1..20: mol_type = other RNA
aagaggttttgttgtttggt

SEQ ID NO: 21508 - RNA, 20 nt, synthetic construct
  source 1..20: mol_type = other RNA
aaggtatgttcttaccaaac

SEQ ID NO: 21509 - RNA, 20 nt, synthetic construct
  source 1..20: mol_type = other RNA
aataaagaggttttgttgtt

SEQ ID NO: 21510 - RNA, 20 nt, synthetic construct
  source 1..20: mol_type = other RNA
acaacaaaacctctttattt

SEQ ID NO: 21511 - RNA, 20 nt, synthetic construct
  source 1..20: mol_type = other RNA
accaaacaacaaaacctctt

SEQ ID NO: 21512 - RNA, 20 nt, synthetic construct
  source 1..20: mol_type = other RNA
acccaaggtatgttcttacc

SEQ ID NO: 21513 - RNA, 20 nt, synthetic construct
  source 1..20: mol_type = other RNA
agaaataaagaggttttgtt

SEQ ID NO: 21514 - RNA, 20 nt, synthetic construct
  source 1..20: mol_type = other RNA
agaggttttgttgtttggta

SEQ ID NO: 21515 - RNA, 20 nt, synthetic construct
  source 1..20: mol_type = other RNA
agcagaaataaagaggtttt

SEQ ID NO: 21516 - RNA, 20 nt, synthetic construct
  source 1..20: mol_type = other RNA
aggtatgttcttaccaaaca

SEQ ID NO: 21517 - RNA, 20 nt, synthetic construct
  source 1..20: mol_type = other RNA
aggttttgttgtttggtaag

SEQ ID NO: 21518 - RNA, 20 nt, synthetic construct
  source 1..20: mol_type = other RNA
ataaagaggttttgttgttt

SEQ ID NO: 21519 - RNA, 20 nt, synthetic construct
  source 1..20: mol_type = other RNA
atgttcttaccaaacaacaa

SEQ ID NO: 21520 - RNA, 20 nt, synthetic construct
  source 1..20: mol_type = other RNA
caaacaacaaaacctcttta

SEQ ID NO: 21521 - RNA, 20 nt, synthetic construct
  source 1..20: mol_type = other RNA
caacaaaacctctttatttc

SEQ ID NO: 21522 - RNA, 20 nt, synthetic construct
  source 1..20: mol_type = other RNA
caacccaaggtatgttctta

SEQ ID NO: 21523 - RNA, 20 nt, synthetic construct
  source 1..20: mol_type = other RNA
caaggtatgttcttaccaaa

SEQ ID NO: 21524 - RNA, 20 nt, synthetic construct
  source 1..20: mol_type = other RNA
cagaaataaagaggttttgt

SEQ ID NO: 21525 - RNA, 20 nt, synthetic construct
  source 1..20: mol_type = other RNA
cagcagaaataaagaggttt

SEQ ID NO: 21526 - RNA, 20 nt, synthetic construct
  source 1..20: mol_type = other RNA
ccaaacaacaaaacctcttt

SEQ ID NO: 21527 - RNA, 20 nt, synthetic construct
  source 1..20: mol_type = other RNA
ccaacccaaggtatgttctt

SEQ ID NO: 21528 - RNA, 20 nt, synthetic construct
  source 1..20: mol_type = other RNA
ccaaggtatgttcttaccaa

SEQ ID NO: 21529 - RNA, 20 nt, synthetic construct
  source 1..20: mol_type = other RNA
cccaaggtatgttcttacca

SEQ ID NO: 21530 - RNA, 20 nt, synthetic construct
  source 1..20: mol_type = other RNA
cctcagcagaaataaagagg

SEQ ID NO: 21531 - RNA, 20 nt, synthetic construct
  source 1..20: mol_type = other RNA
ctcagcagaaataaagaggt

SEQ ID NO: 21532 - RNA, 20 nt, synthetic construct
  source 1..20: mol_type = other RNA
cttaccaaacaacaaaacct

SEQ ID NO: 21533 - RNA, 20 nt, synthetic construct
  source 1..20: mol_type = other RNA
gaaataaagaggttttgttg

SEQ ID NO: 21534 - RNA, 20 nt, synthetic construct
  source 1..20: mol_type = other RNA
gaggttttgttgtttggtaa

SEQ ID NO: 21535 - RNA, 20 nt, synthetic construct
  source 1..20: mol_type = other RNA
gcagaaataaagaggttttg

SEQ ID NO: 21536 - RNA, 20 nt, synthetic construct
  source 1..20: mol_type = other RNA
ggtatgttcttaccaaacaa

SEQ ID NO: 21537 - RNA, 20 nt, synthetic construct
  source 1..20: mol_type = other RNA
ggttttgttgtttggtaaga

SEQ ID NO: 21538 - RNA, 20 nt, synthetic construct
  source 1..20: mol_type = other RNA
gtatgttcttaccaaacaac

SEQ ID NO: 21539 - RNA, 20 nt, synthetic construct
  source 1..20: mol_type = other RNA
gttcttaccaaacaacaaaa

SEQ ID NO: 21540 - RNA, 20 nt, synthetic construct
  source 1..20: mol_type = other RNA
gttgtttggtaagaacatac

SEQ ID NO: 21541 - RNA, 20 nt, synthetic construct
  source 1..20: mol_type = other RNA
gttttgttgtttggtaagaa

SEQ ID NO: 21542 - RNA, 20 nt, synthetic construct
  source 1..20: mol_type = other RNA
taaagaggttttgttgtttg

SEQ ID NO: 21543 - RNA, 20 nt, synthetic construct
  source 1..20: mol_type = other RNA
taccaaacaacaaaacctct

SEQ ID NO: 21544 - RNA, 20 nt, synthetic construct
  source 1..20: mol_type = other RNA
tatgttcttaccaaacaaca

SEQ ID NO: 21545 - RNA, 20 nt, synthetic construct
  source 1..20: mol_type = other RNA
tcagcagaaataaagaggtt

SEQ ID NO: 21546 - RNA, 20 nt, synthetic construct
  source 1..20: mol_type = other RNA
tcttaccaaacaacaaaacc

SEQ ID NO: 21547 - RNA, 20 nt, synthetic construct
  source 1..20: mol_type = other RNA
tgttcttaccaaacaacaaa

SEQ ID NO: 21548 - RNA, 20 nt, synthetic construct
  source 1..20: mol_type = other RNA
tgttgtttggtaagaacata

SEQ ID NO: 21549 - RNA, 20 nt, synthetic construct
  source 1..20: mol_type = other RNA
tgtttggtaagaacatacct

SEQ ID NO: 21550 - RNA, 20 nt, synthetic construct
  source 1..20: mol_type = other RNA
ttaccaaacaacaaaacctc

SEQ ID NO: 21551 - RNA, 20 nt, synthetic construct
  source 1..20: mol_type = other RNA
ttcttaccaaacaacaaaac

SEQ ID NO: 21552 - RNA, 20 nt, synthetic construct
  source 1..20: mol_type = other RNA
ttgttgtttggtaagaacat

SEQ ID NO: 21553 - RNA, 20 nt, synthetic construct
  source 1..20: mol_type = other RNA
ttgtttggtaagaacatacc

SEQ ID NO: 21554 - RNA, 20 nt, synthetic construct
  source 1..20: mol_type = other RNA
tttgttgtttggtaagaaca

SEQ ID NO: 21555 - RNA, 20 nt, synthetic construct
  source 1..20: mol_type = other RNA
ttttgttgtttggtaagaac

SEQ ID NO: 21556 - RNA, 21 nt, synthetic construct
  source 1..21: mol_type = other RNA
aaagaggttttgttgtttggt

SEQ ID NO: 21557 - RNA, 21 nt, synthetic construct
  source 1..21: mol_type = other RNA
aacccaaggtatgttcttacc

SEQ ID NO: 21558 - RNA, 21 nt, synthetic construct
  source 1..21: mol_type = other RNA
aagaggttttgttgtttggta

SEQ ID NO: 21559 - RNA, 21 nt, synthetic construct
  source 1..21: mol_type = other RNA
aaggtatgttcttaccaaaca

SEQ ID NO: 21560 - RNA, 21 nt, synthetic construct
  source 1..21: mol_type = other RNA
acaacaaaacctctttatttc

SEQ ID NO: 21561 - RNA, 21 nt, synthetic construct
  source 1..21: mol_type = other RNA
accaaacaacaaaacctcttt

SEQ ID NO: 21562 - RNA, 21 nt, synthetic construct
  source 1..21: mol_type = other RNA
acccaaggtatgttcttacca

SEQ ID NO: 21563 - RNA, 21 nt, synthetic construct
  source 1..21: mol_type = other RNA
agaaataaagaggttttgttg

SEQ ID NO: 21564 - RNA, 21 nt, synthetic construct
  source 1..21: mol_type = other RNA
agaggttttgttgtttggtaa

SEQ ID NO: 21565 - RNA, 21 nt, synthetic construct
  source 1..21: mol_type = other RNA
agcagaaataaagaggttttg

SEQ ID NO: 21566 - RNA, 21 nt, synthetic construct
  source 1..21: mol_type = other RNA
aggtatgttcttaccaaacaa

SEQ ID NO: 21567 - RNA, 21 nt, synthetic construct
  source 1..21: mol_type = other RNA
aggttttgttgtttggtaaga

SEQ ID NO: 21568 - RNA, 21 nt, synthetic construct
  source 1..21: mol_type = other RNA
ataaagaggttttgttgtttg

SEQ ID NO: 21569 - RNA, 21 nt, synthetic construct
  source 1..21: mol_type = other RNA
atgttcttaccaaacaacaaa

SEQ ID NO: 21570 - RNA, 21 nt, synthetic construct
  source 1..21: mol_type = other RNA
caaacaacaaaacctctttat

SEQ ID NO: 21571 - RNA, 21 nt, synthetic construct
  source 1..21: mol_type = other RNA
caacccaaggtatgttcttac

SEQ ID NO: 21572 - RNA, 21 nt, synthetic construct
  source 1..21: mol_type = other RNA
caaggtatgttcttaccaaac

SEQ ID NO: 21573 - RNA, 21 nt, synthetic construct
  source 1..21: mol_type = other RNA
cagaaataaagaggttttgtt

SEQ ID NO: 21574 - RNA, 21 nt, synthetic construct
  source 1..21: mol_type = other RNA
cagcagaaataaagaggtttt

SEQ ID NO: 21575 - RNA, 21 nt, synthetic construct
  source 1..21: mol_type = other RNA
ccaaacaacaaaacctcttta

SEQ ID NO: 21576 - RNA, 21 nt, synthetic construct
  source 1..21: mol_type = other RNA
ccaacccaaggtatgttctta

SEQ ID NO: 21577 - RNA, 21 nt, synthetic construct
  source 1..21: mol_type = other RNA
ccaaggtatgttcttaccaaa

SEQ ID NO: 21578 - RNA, 21 nt, synthetic construct
  source 1..21: mol_type = other RNA
cccaaggtatgttcttaccaa

SEQ ID NO: 21579 - RNA, 21 nt, synthetic construct
  source 1..21: mol_type = other RNA
cctcagcagaaataaagaggt

SEQ ID NO: 21580 - RNA, 21 nt, synthetic construct
  source 1..21: mol_type = other RNA
ctcagcagaaataaagaggtt

SEQ ID NO: 21581 - RNA, 21 nt, synthetic construct
  source 1..21: mol_type = other RNA
cttaccaaacaacaaaacctc

SEQ ID NO: 21582 - RNA, 21 nt, synthetic construct
  source 1..21: mol_type = other RNA
gaaataaagaggttttgttgt

SEQ ID NO: 21583 - RNA, 21 nt, synthetic construct
  source 1..21: mol_type = other RNA
gaggttttgttgtttggtaag

SEQ ID NO: 21584 - RNA, 21 nt, synthetic construct
  source 1..21: mol_type = other RNA
gcagaaataaagaggttttgt

SEQ ID NO: 21585 - RNA, 21 nt, synthetic construct
  source 1..21: mol_type = other RNA
ggtatgttcttaccaaacaac

SEQ ID NO: 21586 - RNA, 21 nt, synthetic construct
  source 1..21: mol_type = other RNA
ggttttgttgtttggtaagaa

SEQ ID NO: 21587 - RNA, 21 nt, synthetic construct
  source 1..21: mol_type = other RNA
gtatgttcttaccaaacaaca

SEQ ID NO: 21588 - RNA, 21 nt, synthetic construct
  source 1..21: mol_type = other RNA
gttcttaccaaacaacaaaac

SEQ ID NO: 21589 - RNA, 21 nt, synthetic construct
  source 1..21: mol_type = other RNA
gttgtttggtaagaacatacc

SEQ ID NO: 21590 - RNA, 21 nt, synthetic construct
  source 1..21: mol_type = other RNA
gttttgttgtttggtaagaac

SEQ ID NO: 21591 - RNA, 21 nt, synthetic construct
  source 1..21: mol_type = other RNA
taaagaggttttgttgtttgg

SEQ ID NO: 21592 - RNA, 21 nt, synthetic construct
  source 1..21: mol_type = other RNA
taccaaacaacaaaacctctt

SEQ ID NO: 21593 - RNA, 21 nt, synthetic construct
  source 1..21: mol_type = other RNA
tatgttcttaccaaacaacaa

SEQ ID NO: 21594 - RNA, 21 nt, synthetic construct
  source 1..21: mol_type = other RNA
tcagcagaaataaagaggttt

SEQ ID NO: 21595 - RNA, 21 nt, synthetic construct
  source 1..21: mol_type = other RNA
tcttaccaaacaacaaaacct

SEQ ID NO: 21596 - RNA, 21 nt, synthetic construct
  source 1..21: mol_type = other RNA
tgttcttaccaaacaacaaaa

SEQ ID NO: 21597 - RNA, 21 nt, synthetic construct
  source 1..21: mol_type = other RNA
tgttgtttggtaagaacatac

SEQ ID NO: 21598 - RNA, 21 nt, synthetic construct
  source 1..21: mol_type = other RNA
ttaccaaacaacaaaacctct

SEQ ID NO: 21599 - RNA, 21 nt, synthetic construct
  source 1..21: mol_type = other RNA
ttcttaccaaacaacaaaacc

SEQ ID NO: 21600 - RNA, 21 nt, synthetic construct
  source 1..21: mol_type = other RNA
ttgttgtttggtaagaacata

SEQ ID NO: 21601 - RNA, 21 nt, synthetic construct
  source 1..21: mol_type = other RNA
ttgtttggtaagaacatacct

SEQ ID NO: 21602 - RNA, 21 nt, synthetic construct
  source 1..21: mol_type = other RNA
tttgttgtttggtaagaacat

SEQ ID NO: 21603 - RNA, 21 nt, synthetic construct
  source 1..21: mol_type = other RNA
ttttgttgtttggtaagaaca

SEQ ID NO: 21604 - RNA, 22 nt, synthetic construct
  source 1..22: mol_type = other RNA
aaagaggttttgttgtttggta

SEQ ID NO: 21605 - RNA, 22 nt, synthetic construct
  source 1..22: mol_type = other RNA
aacaacaaaacctctttatttc

SEQ ID NO: 21606 - RNA, 22 nt, synthetic construct
  source 1..22: mol_type = other RNA
aacccaaggtatgttcttacca

SEQ ID NO: 21607 - RNA, 22 nt, synthetic construct
  source 1..22: mol_type = other RNA
aagaggttttgttgtttggtaa

SEQ ID NO: 21608 - RNA, 22 nt, synthetic construct
  source 1..22: mol_type = other RNA
aaggtatgttcttaccaaacaa

SEQ ID NO: 21609 - RNA, 22 nt, synthetic construct
  source 1..22: mol_type = other RNA
aataaagaggttttgttgtttg

SEQ ID NO: 21610 - RNA, 22 nt, synthetic construct
  source 1..22: mol_type = other RNA
accaaacaacaaaacctcttta

SEQ ID NO: 21611 - RNA, 22 nt, synthetic construct
  source 1..22: mol_type = other RNA
acccaaggtatgttcttaccaa

SEQ ID NO: 21612 - RNA, 22 nt, synthetic construct
  source 1..22: mol_type = other RNA
agaaataaagaggttttgttgt

SEQ ID NO: 21613 - RNA, 22 nt, synthetic construct
  source 1..22: mol_type = other RNA
agaggttttgttgtttggtaag

SEQ ID NO: 21614 - RNA, 22 nt, synthetic construct
  source 1..22: mol_type = other RNA
agcagaaataaagaggttttgt

SEQ ID NO: 21615 - RNA, 22 nt, synthetic construct
  source 1..22: mol_type = other RNA
aggtatgttcttaccaaacaac

SEQ ID NO: 21616 - RNA, 22 nt, synthetic construct
  source 1..22: mol_type = other RNA
aggttttgttgtttggtaagaa

SEQ ID NO: 21617 - RNA, 22 nt, synthetic construct
  source 1..22: mol_type = other RNA
ataaagaggttttgttgtttgg

SEQ ID NO: 21618 - RNA, 22 nt, synthetic construct
  source 1..22: mol_type = other RNA
atgttcttaccaaacaacaaaa

SEQ ID NO: 21619 - RNA, 22 nt, synthetic construct
  source 1..22: mol_type = other RNA
caaacaacaaaacctctttatt

SEQ ID NO: 21620 - RNA, 22 nt, synthetic construct
  source 1..22: mol_type = other RNA
caacccaaggtatgttcttacc

SEQ ID NO: 21621 - RNA, 22 nt, synthetic construct
  source 1..22: mol_type = other RNA
caaggtatgttcttaccaaaca

SEQ ID NO: 21622 - RNA, 22 nt, synthetic construct
  source 1..22: mol_type = other RNA
cagaaataaagaggttttgttg

SEQ ID NO: 21623 - RNA, 22 nt, synthetic construct
  source 1..22: mol_type = other RNA
cagcagaaataaagaggttttg

SEQ ID NO: 21624 - RNA, 22 nt, synthetic construct
  source 1..22: mol_type = other RNA
ccaaacaacaaaacctctttat

SEQ ID NO: 21625 - RNA, 22 nt, synthetic construct
  source 1..22: mol_type = other RNA
ccaacccaaggtatgttcttac

SEQ ID NO: 21626 - RNA, 22 nt, synthetic construct
  source 1..22: mol_type = other RNA
ccaaggtatgttcttaccaaac

SEQ ID NO: 21627 - RNA, 22 nt, synthetic construct
  source 1..22: mol_type = other RNA
cccaaggtatgttcttaccaaa

SEQ ID NO: 21628 - RNA, 22 nt, synthetic construct
  source 1..22: mol_type = other RNA
cctcagcagaaataaagaggtt

SEQ ID NO: 21629 - RNA, 22 nt, synthetic construct
  source 1..22: mol_type = other RNA
ctcagcagaaataaagaggttt

SEQ ID NO: 21630 - RNA, 22 nt, synthetic construct
  source 1..22: mol_type = other RNA
cttaccaaacaacaaaacctct

SEQ ID NO: 21631 - RNA, 22 nt, synthetic construct
  source 1..22: mol_type = other RNA
gaaataaagaggttttgttgtt

SEQ ID NO: 21632 - RNA, 22 nt, synthetic construct
  source 1..22: mol_type = other RNA
gaggttttgttgtttggtaaga

SEQ ID NO: 21633 - RNA, 22 nt, synthetic construct
  source 1..22: mol_type = other RNA
gcagaaataaagaggttttgtt

SEQ ID NO: 21634 - RNA, 22 nt, synthetic construct
  source 1..22: mol_type = other RNA
ggtatgttcttaccaaacaaca

SEQ ID NO: 21635 - RNA, 22 nt, synthetic construct
  source 1..22: mol_type = other RNA
ggttttgttgtttggtaagaac

SEQ ID NO: 21636 - RNA, 22 nt, synthetic construct
  source 1..22: mol_type = other RNA
gtatgttcttaccaaacaacaa

SEQ ID NO: 21637 - RNA, 22 nt, synthetic construct
  source 1..22: mol_type = other RNA
gttcttaccaaacaacaaaacc

SEQ ID NO: 21638 - RNA, 22 nt, synthetic construct
  source 1..22: mol_type = other RNA
gttgtttggtaagaacatacct

SEQ ID NO: 21639 - RNA, 22 nt, synthetic construct
  source 1..22: mol_type = other RNA
gttttgttgtttggtaagaaca

SEQ ID NO: 21640 - RNA, 22 nt, synthetic construct
  source 1..22: mol_type = other RNA
taaagaggttttgttgtttggt

SEQ ID NO: 21641 - RNA, 22 nt, synthetic construct
  source 1..22: mol_type = other RNA
taccaaacaacaaaacctcttt

SEQ ID NO: 21642 - RNA, 22 nt, synthetic construct
  source 1..22: mol_type = other RNA
tatgttcttaccaaacaacaaa

SEQ ID NO: 21643 - RNA, 22 nt, synthetic construct
  source 1..22: mol_type = other RNA
tcagcagaaataaagaggtttt

SEQ ID NO: 21644 - RNA, 22 nt, synthetic construct
  source 1..22: mol_type = other RNA
tcttaccaaacaacaaaacctc

SEQ ID NO: 21645 - RNA, 22 nt, synthetic construct
  source 1..22: mol_type = other RNA
tgttcttaccaaacaacaaaac

SEQ ID NO: 21646 - RNA, 22 nt, synthetic construct
  source 1..22: mol_type = other RNA
tgttgtttggtaagaacatacc

SEQ ID NO: 21647 - RNA, 22 nt, synthetic construct
  source 1..22: mol_type = other RNA
ttaccaaacaacaaaacctctt

SEQ ID NO: 21648 - RNA, 22 nt, synthetic construct
  source 1..22: mol_type = other RNA
ttcttaccaaacaacaaaacct

SEQ ID NO: 21649 - RNA, 22 nt, synthetic construct
  source 1..22: mol_type = other RNA
ttgttgtttggtaagaacatac

SEQ ID NO: 21650 - RNA, 22 nt, synthetic construct
  source 1..22: mol_type = other RNA
tttgttgtttggtaagaacata

SEQ ID NO: 21651 - RNA, 22 nt, synthetic construct
  source 1..22: mol_type = other RNA
ttttgttgtttggtaagaacat

SEQ ID NO: 21652 - RNA, 20 nt, synthetic construct
  source 1..20: mol_type = other RNA
aaaaaacaaaaaaggcatgt

SEQ ID NO: 21653 - RNA, 20 nt, synthetic construct
  source 1..20: mol_type = other RNA
aaaaaaggcatgtatagagg

SEQ ID NO: 21654 - RNA, 20 nt, synthetic construct
  source 1..20: mol_type = other RNA
aaaaaatggaaggggtggaa

SEQ ID NO: 21655 - RNA, 20 nt, synthetic construct
  source 1..20: mol_type = other RNA
aaaaacaaaaaaggcatgta

SEQ ID NO: 21656 - RNA, 20 nt, synthetic construct
  source 1..20: mol_type = other RNA
aaaaagaaaggcataaacat

SEQ ID NO: 21657 - RNA, 20 nt, synthetic construct
  source 1..20: mol_type = other RNA
aaaaaggcatgtatagagga

SEQ ID NO: 21658 - RNA, 20 nt, synthetic construct
  source 1..20: mol_type = other RNA
aaaaatgcagcgcaatctcc

SEQ ID NO: 21659 - RNA, 20 nt, synthetic construct
  source 1..20: mol_type = other RNA
aaaaatggaaggggtggaaa

SEQ ID NO: 21660 - RNA, 20 nt, synthetic construct
  source 1..20: mol_type = other RNA
aaaacaaaaaaggcatgtat

SEQ ID NO: 21661 - RNA, 20 nt, synthetic construct
  source 1..20: mol_type = other RNA
aaaagaaaggcataaacata

SEQ ID NO: 21662 - RNA, 20 nt, synthetic construct
  source 1..20: mol_type = other RNA
aaaagacacattaatattgc

SEQ ID NO: 21663 - RNA, 20 nt, synthetic construct
  source 1..20: mol_type = other RNA
aaaaggcatgtatagaggaa

SEQ ID NO: 21664 - RNA, 20 nt, synthetic construct
  source 1..20: mol_type = other RNA
aaaagtatcttggggccaaa

SEQ ID NO: 21665 - RNA, 20 nt, synthetic construct
  source 1..20: mol_type = other RNA
aaaataaagaacataccttg

SEQ ID NO: 21666 - RNA, 20 nt, synthetic construct
  source 1..20: mol_type = other RNA
aaaatcagatgggtgtagat

SEQ ID NO: 21667 - RNA, 20 nt, synthetic construct
  source 1..20: mol_type = other RNA
aaaatgcagcgcaatctcca

SEQ ID NO: 21668 - RNA, 20 nt, synthetic construct
  source 1..20: mol_type = other RNA
aaaatggaaggggtggaaac

SEQ ID NO: 21669 - RNA, 20 nt, synthetic construct
  source 1..20: mol_type = other RNA
aaaatggaggtggcttgttg

SEQ ID NO: 21670 - RNA, 20 nt, synthetic construct
  source 1..20: mol_type = other RNA
aaacaaaaaaggcatgtata

SEQ ID NO: 21671 - RNA, 20 nt, synthetic construct
  source 1..20: mol_type = other RNA
aaacacttggtgcctgatat

SEQ ID NO: 21672 - RNA, 20 nt, synthetic construct
  source 1..20: mol_type = other RNA
aaacagagtacaataacatg

SEQ ID NO: 21673 - RNA, 20 nt, synthetic construct
  source 1..20: mol_type = other RNA
aaaccgtgacttggtatctt

SEQ ID NO: 21674 - RNA, 20 nt, synthetic construct
  source 1..20: mol_type = other RNA
aaactgtatgaagtgtctag

SEQ ID NO: 21675 - RNA, 20 nt, synthetic construct
  source 1..20: mol_type = other RNA
aaagaaaggcataaacataa

SEQ ID NO: 21676 - RNA, 20 nt, synthetic construct
  source 1..20: mol_type = other RNA
aaagaacataccttgggttg

SEQ ID NO: 21677 - RNA, 20 nt, synthetic construct
  source 1..20: mol_type = other RNA
aaagacacattaatattgcc

SEQ ID NO: 21678 - RNA, 20 nt, synthetic construct
  source 1..20: mol_type = other RNA
aaagataccaagtcacggtt

SEQ ID NO: 21679 - RNA, 20 nt, synthetic construct
  source 1..20: mol_type = other RNA
aaaggcataaacataagaaa

SEQ ID NO: 21680 - RNA, 20 nt, synthetic construct
  source 1..20: mol_type = other RNA
aaaggcatgtatagaggaat

SEQ ID NO: 21681 - RNA, 20 nt, synthetic construct
  source 1..20: mol_type = other RNA
aaaggctcttaaaaatgcag

SEQ ID NO: 21682 - RNA, 20 nt, synthetic construct
  source 1..20: mol_type = other RNA
aaagtatcttggggccaaat

SEQ ID NO: 21683 - RNA, 20 nt, synthetic construct
  source 1..20: mol_type = other RNA
aaagttcatttctcagttca

SEQ ID NO: 21684 - RNA, 20 nt, synthetic construct
  source 1..20: mol_type = other RNA
aaataaagaacataccttgg

SEQ ID NO: 21685 - RNA, 20 nt, synthetic construct
  source 1..20: mol_type = other RNA
aaataccctggcaatattaa

SEQ ID NO: 21686 - RNA, 20 nt, synthetic construct
  source 1..20: mol_type = other RNA
aaatcagatgggtgtagatc

SEQ ID NO: 21687 - RNA, 20 nt, synthetic construct
  source 1..20: mol_type = other RNA
aaatcatgtagactcttgag

SEQ ID NO: 21688 - RNA, 20 nt, synthetic construct
  source 1..20: mol_type = other RNA
aaatcgatgaccaaatgtaa

SEQ ID NO: 21689 - RNA, 20 nt, synthetic construct
  source 1..20: mol_type = other RNA
aaatgagcttccaccttccc

SEQ ID NO: 21690 - RNA, 20 nt, synthetic construct
  source 1..20: mol_type = other RNA
aaatgcagcgcaatctccag

SEQ ID NO: 21691 - RNA, 20 nt, synthetic construct
  source 1..20: mol_type = other RNA
aaatggaaggggtggaaaca

SEQ ID NO: 21692 - RNA, 20 nt, synthetic construct
  source 1..20: mol_type = other RNA
aaatggaattgggagaaatc

SEQ ID NO: 21693 - RNA, 20 nt, synthetic construct
  source 1..20: mol_type = other RNA
aaatggaggtggcttgttgg

SEQ ID NO: 21694 - RNA, 20 nt, synthetic construct
  source 1..20: mol_type = other RNA
aaatgtaaacacttggtgcc

SEQ ID NO: 21695 - RNA, 20 nt, synthetic construct
  source 1..20: mol_type = other RNA
aacaaaaaaggcatgtatag

SEQ ID NO: 21696 - RNA, 20 nt, synthetic construct
  source 1..20: mol_type = other RNA
aacaagccacctccattttg

SEQ ID NO: 21697 - RNA, 20 nt, synthetic construct
  source 1..20: mol_type = other RNA
aacacatcactcaagagtct

SEQ ID NO: 21698 - RNA, 20 nt, synthetic construct
  source 1..20: mol_type = other RNA
aacacttggtgcctgatata

SEQ ID NO: 21699 - RNA, 20 nt, synthetic construct
  source 1..20: mol_type = other RNA
aacagagtacaataacatga

SEQ ID NO: 21700 - RNA, 20 nt, synthetic construct
  source 1..20: mol_type = other RNA
aacataccttgggttgatcc

SEQ ID NO: 21701 - RNA, 20 nt, synthetic construct
  source 1..20: mol_type = other RNA
aacatctgccacgtatagag

SEQ ID NO: 21702 - RNA, 20 nt, synthetic construct
  source 1..20: mol_type = other RNA
aacatgagtaatttgatggg

SEQ ID NO: 21703 - RNA, 20 nt, synthetic construct
  source 1..20: mol_type = other RNA
aaccaaaaagaaaggcataa

SEQ ID NO: 21704 - RNA, 20 nt, synthetic construct
  source 1..20: mol_type = other RNA
aacccaaggtatgttcttta

SEQ ID NO: 21705 - RNA, 20 nt, synthetic construct
  source 1..20: mol_type = other RNA
aaccgtgacttggtatcttt

SEQ ID NO: 21706 - RNA, 20 nt, synthetic construct
  source 1..20: mol_type = other RNA
aacctcagataataacatct

SEQ ID NO: 21707 - RNA, 20 nt, synthetic construct
  source 1..20: mol_type = other RNA
aactcccaacttcaagtgat

SEQ ID NO: 21708 - RNA, 20 nt, synthetic construct
  source 1..20: mol_type = other RNA
aactgagaaatgaactttga

SEQ ID NO: 21709 - RNA, 20 nt, synthetic construct
  source 1..20: mol_type = other RNA
aactgtatgaagtgtctagt

SEQ ID NO: 21710 - RNA, 20 nt, synthetic construct
  source 1..20: mol_type = other RNA
aacttcaagtgatcagcctg

SEQ ID NO: 21711 - RNA, 20 nt, synthetic construct
  source 1..20: mol_type = other RNA
aacttggtgtcaagctatat

SEQ ID NO: 21712 - RNA, 20 nt, synthetic construct
  source 1..20: mol_type = other RNA
aactttgaaaagtatcttgg

SEQ ID NO: 21713 - RNA, 20 nt, synthetic construct
  source 1..20: mol_type = other RNA
aagaaaggcataaacataag

SEQ ID NO: 21714 - RNA, 20 nt, synthetic construct
  source 1..20: mol_type = other RNA
aagaacataccttgggttga

SEQ ID NO: 21715 - RNA, 20 nt, synthetic construct
  source 1..20: mol_type = other RNA
aagaataaaccgtgacttgg

SEQ ID NO: 21716 - RNA, 20 nt, synthetic construct
  source 1..20: mol_type = other RNA
aagacacattaatattgcca

SEQ ID NO: 21717 - RNA, 20 nt, synthetic construct
  source 1..20: mol_type = other RNA
aagagcctttctctggaggc

SEQ ID NO: 21718 - RNA, 20 nt, synthetic construct
  source 1..20: mol_type = other RNA
aagagtctacatgatttggc

SEQ ID NO: 21719 - RNA, 20 nt, synthetic construct
  source 1..20: mol_type = other RNA
aagataccaagtcacggttt

SEQ ID NO: 21720 - RNA, 20 nt, synthetic construct
  source 1..20: mol_type = other RNA
aagatactgctagaaatctg

SEQ ID NO: 21721 - RNA, 20 nt, synthetic construct
  source 1..20: mol_type = other RNA
aagatacttttcaaagttca

SEQ ID NO: 21722 - RNA, 20 nt, synthetic construct
  source 1..20: mol_type = other RNA
aagccacctccattttgaag

SEQ ID NO: 21723 - RNA, 20 nt, synthetic construct
  source 1..20: mol_type = other RNA
aagctatatcaggcaccaag

SEQ ID NO: 21724 - RNA, 20 nt, synthetic construct
  source 1..20: mol_type = other RNA
aagctcatttggccagagtg

SEQ ID NO: 21725 - RNA, 20 nt, synthetic construct
  source 1..20: mol_type = other RNA
aaggaatgctatgagtgctg

SEQ ID NO: 21726 - RNA, 20 nt, synthetic construct
  source 1..20: mol_type = other RNA
aaggacttctgatgccctct

SEQ ID NO: 21727 - RNA, 20 nt, synthetic construct
  source 1..20: mol_type = other RNA
aaggcaggagcaggaaccaa

SEQ ID NO: 21728 - RNA, 20 nt, synthetic construct
  source 1..20: mol_type = other RNA
aaggcaggctgatcacttga

SEQ ID NO: 21729 - RNA, 20 nt, synthetic construct
  source 1..20: mol_type = other RNA
aaggcataaacataagaaaa

SEQ ID NO: 21730 - RNA, 20 nt, synthetic construct
  source 1..20: mol_type = other RNA
aaggcatgtatagaggaatt

SEQ ID NO: 21731 - RNA, 20 nt, synthetic construct
  source 1..20: mol_type = other RNA
aaggctcttaaaaatgcagc

SEQ ID NO: 21732 - RNA, 20 nt, synthetic construct
  source 1..20: mol_type = other RNA
aaggggtggaaacagagtac

SEQ ID NO: 21733 - RNA, 20 nt, synthetic construct
  source 1..20: mol_type = other RNA
aaggtggaagctcatttggc

SEQ ID NO: 21734 - RNA, 20 nt, synthetic construct
  source 1..20: mol_type = other RNA
aagtatcttggggccaaatc

SEQ ID NO: 21735 - RNA, 20 nt, synthetic construct
  source 1..20: mol_type = other RNA
aagtcacggtttattcttca

SEQ ID NO: 21736 - RNA, 20 nt, synthetic construct
  source 1..20: mol_type = other RNA
aagtccttgagagcctccag

SEQ ID NO: 21737 - RNA, 20 nt, synthetic construct
  source 1..20: mol_type = other RNA
aagtgaaataccctggcaat

SEQ ID NO: 21738 - RNA, 20 nt, synthetic construct
  source 1..20: mol_type = other RNA
aagtgattcctgggactaca

SEQ ID NO: 21739 - RNA, 20 nt, synthetic construct
  source 1..20: mol_type = other RNA
aagtggatcaacccaaggta

SEQ ID NO: 21740 - RNA, 20 nt, synthetic construct
  source 1..20: mol_type = other RNA
aagtgtctagtagagtgcct

SEQ ID NO: 21741 - RNA, 20 nt, synthetic construct
  source 1..20: mol_type = other RNA
aagtgtttacatttggtcat

SEQ ID NO: 21742 - RNA, 20 nt, synthetic construct
  source 1..20: mol_type = other RNA
aagttagccccaagtgaaat

SEQ ID NO: 21743 - RNA, 20 nt, synthetic construct
  source 1..20: mol_type = other RNA
aagttcatttctcagttcat

SEQ ID NO: 21744 - RNA, 20 nt, synthetic construct
  source 1..20: mol_type = other RNA
aataaaccgtgacttggtat

SEQ ID NO: 21745 - RNA, 20 nt, synthetic construct
  source 1..20: mol_type = other RNA
aataaagaacataccttggg

SEQ ID NO: 21746 - RNA, 20 nt, synthetic construct
  source 1..20: mol_type = other RNA
aataacatctgccacgtata

SEQ ID NO: 21747 - RNA, 20 nt, synthetic construct
  source 1..20: mol_type = other RNA
aataccctggcaatattaat

SEQ ID NO: 21748 - RNA, 20 nt, synthetic construct
  source 1..20: mol_type = other RNA
aatagcccccatcaaattac

SEQ ID NO: 21749 - RNA, 20 nt, synthetic construct
  source 1..20: mol_type = other RNA
aatatcgggaaaagacacat

SEQ ID NO: 21750 - RNA, 20 nt, synthetic construct
  source 1..20: mol_type = other RNA
aatattaatgtgtcttttcc

SEQ ID NO: 21751 - RNA, 20 nt, synthetic construct
  source 1..20: mol_type = other RNA
aatattgccagggtatttca

SEQ ID NO: 21752 - RNA, 20 nt, synthetic construct
  source 1..20: mol_type = other RNA
aatcagatgggtgtagatca

SEQ ID NO: 21753 - RNA, 20 nt, synthetic construct
  source 1..20: mol_type = other RNA
aatcatgtagactcttgagt

SEQ ID NO: 21754 - RNA, 20 nt, synthetic construct
  source 1..20: mol_type = other RNA
aatcgatgaccaaatgtaaa

SEQ ID NO: 21755 - RNA, 20 nt, synthetic construct
  source 1..20: mol_type = other RNA
aatctcattccattgcccag

SEQ ID NO: 21756 - RNA, 20 nt, synthetic construct
  source 1..20: mol_type = other RNA
aatctccagtgacagaagat

SEQ ID NO: 21757 - RNA, 20 nt, synthetic construct
  source 1..20: mol_type = other RNA
aatgaactttgaaaagtatc

SEQ ID NO: 21758 - RNA, 20 nt, synthetic construct
  source 1..20: mol_type = other RNA
aatgagattccatcccaaaa

SEQ ID NO: 21759 - RNA, 20 nt, synthetic construct
  source 1..20: mol_type = other RNA
aatgagcttccaccttccca

SEQ ID NO: 21760 - RNA, 20 nt, synthetic construct
  source 1..20: mol_type = other RNA
aatgcagcgcaatctccagt

SEQ ID NO: 21761 - RNA, 20 nt, synthetic construct
  source 1..20: mol_type = other RNA
aatgctatgagtgctgagag

SEQ ID NO: 21762 - RNA, 20 nt, synthetic construct
  source 1..20: mol_type = other RNA
aatggaaggggtggaaacag

SEQ ID NO: 21763 - RNA, 20 nt, synthetic construct
  source 1..20: mol_type = other RNA
aatggaatgagattccatcc

SEQ ID NO: 21764 - RNA, 20 nt, synthetic construct
  source 1..20: mol_type = other RNA
aatggaattgggagaaatcg

SEQ ID NO: 21765 - RNA, 20 nt, synthetic construct
  source 1..20: mol_type = other RNA
aatggaggtggcttgttggg

SEQ ID NO: 21766 - RNA, 20 nt, synthetic construct
  source 1..20: mol_type = other RNA
aatgtaaacacttggtgcct

SEQ ID NO: 21767 - RNA, 20 nt, synthetic construct
  source 1..20: mol_type = other RNA
aattactcatgttattgtac

SEQ ID NO: 21768 - RNA, 20 nt, synthetic construct
  source 1..20: mol_type = other RNA
aattatgagggaaagatacc

SEQ ID NO: 21769 - RNA, 20 nt, synthetic construct
  source 1..20: mol_type = other RNA
aattccatttccactctggc

SEQ ID NO: 21770 - RNA, 20 nt, synthetic construct
  source 1..20: mol_type = other RNA
aattcctctatacatgcctt

SEQ ID NO: 21771 - RNA, 20 nt, synthetic construct
  source 1..20: mol_type = other RNA
aattgctatgtcccaggcac

SEQ ID NO: 21772 - RNA, 20 nt, synthetic construct
  source 1..20: mol_type = other RNA
aattgctctatacgtggcag

SEQ ID NO: 21773 - RNA, 20 nt, synthetic construct
  source 1..20: mol_type = other RNA
aattgggagaaatcgatgac

SEQ ID NO: 21774 - RNA, 20 nt, synthetic construct
  source 1..20: mol_type = other RNA
aatttgatgggggctattat

SEQ ID NO: 21775 - RNA, 20 nt, synthetic construct
  source 1..20: mol_type = other RNA
acaaaaaaggcatgtataga

SEQ ID NO: 21776 - RNA, 20 nt, synthetic construct
  source 1..20: mol_type = other RNA
acaagccacctccattttga

SEQ ID NO: 21777 - RNA, 20 nt, synthetic construct
  source 1..20: mol_type = other RNA
acaataacatgagtaatttg

SEQ ID NO: 21778 - RNA, 20 nt, synthetic construct
  source 1..20: mol_type = other RNA
acacatcactcaagagtcta

SEQ ID NO: 21779 - RNA, 20 nt, synthetic construct
  source 1..20: mol_type = other RNA
acacattaatattgccaggg

SEQ ID NO: 21780 - RNA, 20 nt, synthetic construct
  source 1..20: mol_type = other RNA
acaccaagttagccccaagt

SEQ ID NO: 21781 - RNA, 20 nt, synthetic construct
  source 1..20: mol_type = other RNA
acacccatctgattttctaa

SEQ ID NO: 21782 - RNA, 20 nt, synthetic construct
  source 1..20: mol_type = other RNA
acactgcactccagcctggg

SEQ ID NO: 21783 - RNA, 20 nt, synthetic construct
  source 1..20: mol_type = other RNA
acacttcatacagtttagaa

SEQ ID NO: 21784 - RNA, 20 nt, synthetic construct
  source 1..20: mol_type = other RNA
acacttggtgcctgatatag

SEQ ID NO: 21785 - RNA, 20 nt, synthetic construct
  source 1..20: mol_type = other RNA
acagaagatactgctagaaa

SEQ ID NO: 21786 - RNA, 20 nt, synthetic construct
  source 1..20: mol_type = other RNA
acagagtacaataacatgag

SEQ ID NO: 21787 - RNA, 20 nt, synthetic construct
  source 1..20: mol_type = other RNA
acagtttagaaaatcagatg

SEQ ID NO: 21788 - RNA, 20 nt, synthetic construct
  source 1..20: mol_type = other RNA
acataccttgggttgatcca

SEQ ID NO: 21789 - RNA, 20 nt, synthetic construct
  source 1..20: mol_type = other RNA
acatagcaattgctctatac

SEQ ID NO: 21790 - RNA, 20 nt, synthetic construct
  source 1..20: mol_type = other RNA
acatcactcaagagtctaca

SEQ ID NO: 21791 - RNA, 20 nt, synthetic construct
  source 1..20: mol_type = other RNA
acatctgccacgtatagagc

SEQ ID NO: 21792 - RNA, 20 nt, synthetic construct
  source 1..20: mol_type = other RNA
acatgagtaatttgatgggg

SEQ ID NO: 21793 - RNA, 20 nt, synthetic construct
  source 1..20: mol_type = other RNA
acatgatttggccccaagat

SEQ ID NO: 21794 - RNA, 20 nt, synthetic construct
  source 1..20: mol_type = other RNA
acatgccttttttgtttttt

SEQ ID NO: 21795 - RNA, 20 nt, synthetic construct
  source 1..20: mol_type = other RNA
acattaatattgccagggta

SEQ ID NO: 21796 - RNA, 20 nt, synthetic construct
  source 1..20: mol_type = other RNA
acatttggtcatcgatttct

SEQ ID NO: 21797 - RNA, 20 nt, synthetic construct
  source 1..20: mol_type = other RNA
accaaaaagaaaggcataaa

SEQ ID NO: 21798 - RNA, 20 nt, synthetic construct
  source 1..20: mol_type = other RNA
accaaatgtaaacacttggt

SEQ ID NO: 21799 - RNA, 20 nt, synthetic construct
  source 1..20: mol_type = other RNA
accaagtcacggtttattct

SEQ ID NO: 21800 - RNA, 20 nt, synthetic construct
  source 1..20: mol_type = other RNA
accaagtgtttacatttggt

SEQ ID NO: 21801 - RNA, 20 nt, synthetic construct
  source 1..20: mol_type = other RNA
accaagttagccccaagtga

SEQ ID NO: 21802 - RNA, 20 nt, synthetic construct
  source 1..20: mol_type = other RNA
acccaaggtatgttctttat

SEQ ID NO: 21803 - RNA, 20 nt, synthetic construct
  source 1..20: mol_type = other RNA
acccatctgattttctaaac

SEQ ID NO: 21804 - RNA, 20 nt, synthetic construct
  source 1..20: mol_type = other RNA
accctggcaatattaatgtg

SEQ ID NO: 21805 - RNA, 20 nt, synthetic construct
  source 1..20: mol_type = other RNA
accgtgacttggtatctttc

SEQ ID NO: 21806 - RNA, 20 nt, synthetic construct
  source 1..20: mol_type = other RNA
acctcagataataacatctg

SEQ ID NO: 21807 - RNA, 20 nt, synthetic construct
  source 1..20: mol_type = other RNA
acctccattttgaagaataa

SEQ ID NO: 21808 - RNA, 20 nt, synthetic construct
  source 1..20: mol_type = other RNA
accttcccaacaagccacct

SEQ ID NO: 21809 - RNA, 20 nt, synthetic construct
  source 1..20: mol_type = other RNA
accttgggttgatccactta

SEQ ID NO: 21810 - RNA, 20 nt, synthetic construct
  source 1..20: mol_type = other RNA
acggtttattcttcaaaatg

SEQ ID NO: 21811 - RNA, 20 nt, synthetic construct
  source 1..20: mol_type = other RNA
acgtatagagcaattgctat

SEQ ID NO: 21812 - RNA, 20 nt, synthetic construct
  source 1..20: mol_type = other RNA
acgtggcagatgttattatc

SEQ ID NO: 21813 - RNA, 20 nt, synthetic construct
  source 1..20: mol_type = other RNA
actagacacttcatacagtt

SEQ ID NO: 21814 - RNA, 20 nt, synthetic construct
  source 1..20: mol_type = other RNA
actcaagagtctacatgatt

SEQ ID NO: 21815 - RNA, 20 nt, synthetic construct
  source 1..20: mol_type = other RNA
actcatagcattccttaaca

SEQ ID NO: 21816 - RNA, 20 nt, synthetic construct
  source 1..20: mol_type = other RNA
actcatgttattgtactctg

SEQ ID NO: 21817 - RNA, 20 nt, synthetic construct
  source 1..20: mol_type = other RNA
actccagcctgggcaatgga

SEQ ID NO: 21818 - RNA, 20 nt, synthetic construct
  source 1..20: mol_type = other RNA
actcccaacttcaagtgatc

SEQ ID NO: 21819 - RNA, 20 nt, synthetic construct
  source 1..20: mol_type = other RNA
actctactagacacttcata

SEQ ID NO: 21820 - RNA, 20 nt, synthetic construct
  source 1..20: mol_type = other RNA
actctggccaaatgagcttc

SEQ ID NO: 21821 - RNA, 20 nt, synthetic construct
  source 1..20: mol_type = other RNA
actctgtttccaccccttcc

SEQ ID NO: 21822 - RNA, 20 nt, synthetic construct
  source 1..20: mol_type = other RNA
actcttgagtgatgtgttaa

SEQ ID NO: 21823 - RNA, 20 nt, synthetic construct
  source 1..20: mol_type = other RNA
actgagaaatgaactttgaa

SEQ ID NO: 21824 - RNA, 20 nt, synthetic construct
  source 1..20: mol_type = other RNA
actgctagaaatctgctaga

SEQ ID NO: 21825 - RNA, 20 nt, synthetic construct
  source 1..20: mol_type = other RNA
actggagattgcgctgcatt

SEQ ID NO: 21826 - RNA, 20 nt, synthetic construct
  source 1..20: mol_type = other RNA
actgtatgaagtgtctagta

SEQ ID NO: 21827 - RNA, 20 nt, synthetic construct
  source 1..20: mol_type = other RNA
acttaggaacctcagataat

SEQ ID NO: 21828 - RNA, 20 nt, synthetic construct
  source 1..20: mol_type = other RNA
acttcaagtgatcagcctgc

SEQ ID NO: 21829 - RNA, 20 nt, synthetic construct
  source 1..20: mol_type = other RNA
acttcatacagtttagaaaa

SEQ ID NO: 21830 - RNA, 20 nt, synthetic construct
  source 1..20: mol_type = other RNA
acttctgatgccctctcagc

SEQ ID NO: 21831 - RNA, 20 nt, synthetic construct
  source 1..20: mol_type = other RNA
acttggggctaacttggtgt

SEQ ID NO: 21832 - RNA, 20 nt, synthetic construct
  source 1..20: mol_type = other RNA
acttggtatctttccctcat

SEQ ID NO: 21833 - RNA, 20 nt, synthetic construct
  source 1..20: mol_type = other RNA
acttggtgcctgatatagct

SEQ ID NO: 21834 - RNA, 20 nt, synthetic construct
  source 1..20: mol_type = other RNA
acttggtgtcaagctatatc

SEQ ID NO: 21835 - RNA, 20 nt, synthetic construct
  source 1..20: mol_type = other RNA
actttgaaaagtatcttggg

SEQ ID NO: 21836 - RNA, 20 nt, synthetic construct
  source 1..20: mol_type = other RNA
acttttcaaagttcatttct

SEQ ID NO: 21837 - RNA, 20 nt, synthetic construct
  source 1..20: mol_type = other RNA
agaaaatcagatgggtgtag

SEQ ID NO: 21838 - RNA, 20 nt, synthetic construct
  source 1..20: mol_type = other RNA
agaaaggcataaacataaga

SEQ ID NO: 21839 - RNA, 20 nt, synthetic construct
  source 1..20: mol_type = other RNA
agaaaggctcttaaaaatgc

SEQ ID NO: 21840 - RNA, 20 nt, synthetic construct
  source 1..20: mol_type = other RNA
agaaatcgatgaccaaatgt

SEQ ID NO: 21841 - RNA, 20 nt, synthetic construct
  source 1..20: mol_type = other RNA
agaaatgaactttgaaaagt

SEQ ID NO: 21842 - RNA, 20 nt, synthetic construct
  source 1..20: mol_type = other RNA
agaacataccttgggttgat

SEQ ID NO: 21843 - RNA, 20 nt, synthetic construct
  source 1..20: mol_type = other RNA
agaagatactgctagaaatc

SEQ ID NO: 21844 - RNA, 20 nt, synthetic construct
  source 1..20: mol_type = other RNA
agaagtccttgagagcctcc

SEQ ID NO: 21845 - RNA, 20 nt, synthetic construct
  source 1..20: mol_type = other RNA
agaataaaccgtgacttggt

SEQ ID NO: 21846 - RNA, 20 nt, synthetic construct
  source 1..20: mol_type = other RNA
agacacattaatattgccag

SEQ ID NO: 21847 - RNA, 20 nt, synthetic construct
  source 1..20: mol_type = other RNA
agacacttcatacagtttag

SEQ ID NO: 21848 - RNA, 20 nt, synthetic construct
  source 1..20: mol_type = other RNA
agactcttgagtgatgtgtt

SEQ ID NO: 21849 - RNA, 20 nt, synthetic construct
  source 1..20: mol_type = other RNA
agagaaaggctcttaaaaat

SEQ ID NO: 21850 - RNA, 20 nt, synthetic construct
  source 1..20: mol_type = other RNA
agagcaattgctatgtccca

SEQ ID NO: 21851 - RNA, 20 nt, synthetic construct
  source 1..20: mol_type = other RNA
agagcctccagagaaaggct

SEQ ID NO: 21852 - RNA, 20 nt, synthetic construct
  source 1..20: mol_type = other RNA
agagcctttctctggaggct

SEQ ID NO: 21853 - RNA, 20 nt, synthetic construct
  source 1..20: mol_type = other RNA
agaggaattatgagggaaag

SEQ ID NO: 21854 - RNA, 20 nt, synthetic construct
  source 1..20: mol_type = other RNA
agagggcatcagaagtcctt

SEQ ID NO: 21855 - RNA, 20 nt, synthetic construct
  source 1..20: mol_type = other RNA
agagtacaataacatgagta

SEQ ID NO: 21856 - RNA, 20 nt, synthetic construct
  source 1..20: mol_type = other RNA
agagtctacatgatttggcc

SEQ ID NO: 21857 - RNA, 20 nt, synthetic construct
  source 1..20: mol_type = other RNA
agagtgcctgggacatagca

SEQ ID NO: 21858 - RNA, 20 nt, synthetic construct
  source 1..20: mol_type = other RNA
agagtggaaatggaattggg

SEQ ID NO: 21859 - RNA, 20 nt, synthetic construct
  source 1..20: mol_type = other RNA
agataataacatctgccacg

SEQ ID NO: 21860 - RNA, 20 nt, synthetic construct
  source 1..20: mol_type = other RNA
agataccaagtcacggttta

SEQ ID NO: 21861 - RNA, 20 nt, synthetic construct
  source 1..20: mol_type = other RNA
agatactgctagaaatctgc

SEQ ID NO: 21862 - RNA, 20 nt, synthetic construct
  source 1..20: mol_type = other RNA
agatacttttcaaagttcat

SEQ ID NO: 21863 - RNA, 20 nt, synthetic construct
  source 1..20: mol_type = other RNA
agatcaaggcaggagcagga

SEQ ID NO: 21864 - RNA, 20 nt, synthetic construct
  source 1..20: mol_type = other RNA
agatctcaccactgcacact

SEQ ID NO: 21865 - RNA, 20 nt, synthetic construct
  source 1..20: mol_type = other RNA
agatgggtgtagatcaaggc

SEQ ID NO: 21866 - RNA, 20 nt, synthetic construct
  source 1..20: mol_type = other RNA
agatgttattatctgaggtt

SEQ ID NO: 21867 - RNA, 20 nt, synthetic construct
  source 1..20: mol_type = other RNA
agattccatcccaaaaaata

SEQ ID NO: 21868 - RNA, 20 nt, synthetic construct
  source 1..20: mol_type = other RNA
agattgcgctgcatttttaa

SEQ ID NO: 21869 - RNA, 20 nt, synthetic construct
  source 1..20: mol_type = other RNA
agatttctagcagtatcttc

SEQ ID NO: 21870 - RNA, 20 nt, synthetic construct
  source 1..20: mol_type = other RNA
agcaattgctatgtcccagg

SEQ ID NO: 21871 - RNA, 20 nt, synthetic construct
  source 1..20: mol_type = other RNA
agcaattgctctatacgtgg

SEQ ID NO: 21872 - RNA, 20 nt, synthetic construct
  source 1..20: mol_type = other RNA
agcactcatagcattcctta

SEQ ID NO: 21873 - RNA, 20 nt, synthetic construct
  source 1..20: mol_type = other RNA
agcagatttctagcagtatc

SEQ ID NO: 21874 - RNA, 20 nt, synthetic construct
  source 1..20: mol_type = other RNA
agcaggaaccaaaaagaaag

SEQ ID NO: 21875 - RNA, 20 nt, synthetic construct
  source 1..20: mol_type = other RNA
agcagtatcttctgtcactg

SEQ ID NO: 21876 - RNA, 20 nt, synthetic construct
  source 1..20: mol_type = other RNA
agcattccttaacacatcac

SEQ ID NO: 21877 - RNA, 20 nt, synthetic construct
  source 1..20: mol_type = other RNA
agccacctccattttgaaga

SEQ ID NO: 21878 - RNA, 20 nt, synthetic construct
  source 1..20: mol_type = other RNA
agccccaagtgaaataccct

SEQ ID NO: 21879 - RNA, 20 nt, synthetic construct
  source 1..20: mol_type = other RNA
agcccccatcaaattactca

SEQ ID NO: 21880 - RNA, 20 nt, synthetic construct
  source 1..20: mol_type = other RNA
agcctccagagaaaggctct

SEQ ID NO: 21881 - RNA, 20 nt, synthetic construct
  source 1..20: mol_type = other RNA
agcctgggcaatggaatgag

SEQ ID NO: 21882 - RNA, 20 nt, synthetic construct
  source 1..20: mol_type = other RNA
agcctttctctggaggctct

SEQ ID NO: 21883 - RNA, 20 nt, synthetic construct
  source 1..20: mol_type = other RNA
agcgcaatctccagtgacag

SEQ ID NO: 21884 - RNA, 20 nt, synthetic construct
  source 1..20: mol_type = other RNA
agctatatcaggcaccaagt

SEQ ID NO: 21885 - RNA, 20 nt, synthetic construct
  source 1..20: mol_type = other RNA
agctcatttggccagagtgg

SEQ ID NO: 21886 - RNA, 20 nt, synthetic construct
  source 1..20: mol_type = other RNA
agctgagatctcaccactgc

SEQ ID NO: 21887 - RNA, 20 nt, synthetic construct
  source 1..20: mol_type = other RNA
agcttccaccttcccaacaa

SEQ ID NO: 21888 - RNA, 20 nt, synthetic construct
  source 1..20: mol_type = other RNA
agcttgacaccaagttagcc

SEQ ID NO: 21889 - RNA, 20 nt, synthetic construct
  source 1..20: mol_type = other RNA
aggaaccaaaaagaaaggca

SEQ ID NO: 21890 - RNA, 20 nt, synthetic construct
  source 1..20: mol_type = other RNA
aggaacctcagataataaca

SEQ ID NO: 21891 - RNA, 20 nt, synthetic construct
  source 1..20: mol_type = other RNA
aggaatatcgggaaaagaca

SEQ ID NO: 21892 - RNA, 20 nt, synthetic construct
  source 1..20: mol_type = other RNA
aggaatgctatgagtgctga

SEQ ID NO: 21893 - RNA, 20 nt, synthetic construct
  source 1..20: mol_type = other RNA
aggaattatgagggaaagat

SEQ ID NO: 21894 - RNA, 20 nt, synthetic construct
  source 1..20: mol_type = other RNA
aggacttctgatgccctctc

SEQ ID NO: 21895 - RNA, 20 nt, synthetic construct
  source 1..20: mol_type = other RNA
aggagcaggaaccaaaaaga

SEQ ID NO: 21896 - RNA, 20 nt, synthetic construct
  source 1..20: mol_type = other RNA
aggcaccaagtgtttacatt

SEQ ID NO: 21897 - RNA, 20 nt, synthetic construct
  source 1..20: mol_type = other RNA
aggcactctactagacactt

SEQ ID NO: 21898 - RNA, 20 nt, synthetic construct
  source 1..20: mol_type = other RNA
aggcaggagcaggaaccaaa

SEQ ID NO: 21899 - RNA, 20 nt, synthetic construct
  source 1..20: mol_type = other RNA
aggcaggctgatcacttgaa

SEQ ID NO: 21900 - RNA, 20 nt, synthetic construct
  source 1..20: mol_type = other RNA
aggcataaacataagaaaaa

SEQ ID NO: 21901 - RNA, 20 nt, synthetic construct
  source 1..20: mol_type = other RNA
aggcatgtatagaggaatta

SEQ ID NO: 21902 - RNA, 20 nt, synthetic construct
  source 1..20: mol_type = other RNA
aggccaaggcaggctgatca

SEQ ID NO: 21903 - RNA, 20 nt, synthetic construct
  source 1..20: mol_type = other RNA
aggctctcaaggacttctga

SEQ ID NO: 21904 - RNA, 20 nt, synthetic construct
  source 1..20: mol_type = other RNA
aggctcttaaaaatgcagcg

SEQ ID NO: 21905 - RNA, 20 nt, synthetic construct
  source 1..20: mol_type = other RNA
aggctgatcacttgaagttg

SEQ ID NO: 21906 - RNA, 20 nt, synthetic construct
  source 1..20: mol_type = other RNA
aggctggagtgcagtgtgca

SEQ ID NO: 21907 - RNA, 20 nt, synthetic construct
  source 1..20: mol_type = other RNA
agggaaagataccaagtcac

SEQ ID NO: 21908 - RNA, 20 nt, synthetic construct
  source 1..20: mol_type = other RNA
agggcatcagaagtccttga

SEQ ID NO: 21909 - RNA, 20 nt, synthetic construct
  source 1..20: mol_type = other RNA
aggggtggaaacagagtaca

SEQ ID NO: 21910 - RNA, 20 nt, synthetic construct
  source 1..20: mol_type = other RNA
agggtatttcacttggggct

SEQ ID NO: 21911 - RNA, 20 nt, synthetic construct
  source 1..20: mol_type = other RNA
aggtggaagctcatttggcc

SEQ ID NO: 21912 - RNA, 20 nt, synthetic construct
  source 1..20: mol_type = other RNA
aggtggcttgttgggaaggt

SEQ ID NO: 21913 - RNA, 20 nt, synthetic construct
  source 1..20: mol_type = other RNA
aggttcctaagtggatcaac

SEQ ID NO: 21914 - RNA, 20 nt, synthetic construct
  source 1..20: mol_type = other RNA
agtaatttgatgggggctat

SEQ ID NO: 21915 - RNA, 20 nt, synthetic construct
  source 1..20: mol_type = other RNA
agtacaataacatgagtaat

SEQ ID NO: 21916 - RNA, 20 nt, synthetic construct
  source 1..20: mol_type = other RNA
agtagagtgcctgggacata

SEQ ID NO: 21917 - RNA, 20 nt, synthetic construct
  source 1..20: mol_type = other RNA
agtatcttctgtcactggag

SEQ ID NO: 21918 - RNA, 20 nt, synthetic construct
  source 1..20: mol_type = other RNA
agtatcttggggccaaatca

SEQ ID NO: 21919 - RNA, 20 nt, synthetic construct
  source 1..20: mol_type = other RNA
agtcacggtttattcttcaa

SEQ ID NO: 21920 - RNA, 20 nt, synthetic construct
  source 1..20: mol_type = other RNA
agtcccaggaatcacttgaa

SEQ ID NO: 21921 - RNA, 20 nt, synthetic construct
  source 1..20: mol_type = other RNA
agtccttgagagcctccaga

SEQ ID NO: 21922 - RNA, 20 nt, synthetic construct
  source 1..20: mol_type = other RNA
agtctacatgatttggcccc

SEQ ID NO: 21923 - RNA, 20 nt, synthetic construct
  source 1..20: mol_type = other RNA
agtgaaataccctggcaata

SEQ ID NO: 21924 - RNA, 20 nt, synthetic construct
  source 1..20: mol_type = other RNA
agtgacagaagatactgcta

SEQ ID NO: 21925 - RNA, 20 nt, synthetic construct
  source 1..20: mol_type = other RNA
agtgagctgagatctcacca

SEQ ID NO: 21926 - RNA, 20 nt, synthetic construct
  source 1..20: mol_type = other RNA
agtgatgtgttaaggaatgc

SEQ ID NO: 21927 - RNA, 20 nt, synthetic construct
  source 1..20: mol_type = other RNA
agtgattcctgggactacag

SEQ ID NO: 21928 - RNA, 20 nt, synthetic construct
  source 1..20: mol_type = other RNA
agtgcagtgtgcagtggtga

SEQ ID NO: 21929 - RNA, 20 nt, synthetic construct
  source 1..20: mol_type = other RNA
agtgcctgggacatagcaat

SEQ ID NO: 21930 - RNA, 20 nt, synthetic construct
  source 1..20: mol_type = other RNA
agtgctgagagggcatcaga

SEQ ID NO: 21931 - RNA, 20 nt, synthetic construct
  source 1..20: mol_type = other RNA
agtggaaatggaattgggag

SEQ ID NO: 21932 - RNA, 20 nt, synthetic construct
  source 1..20: mol_type = other RNA
agtggatcaacccaaggtat

SEQ ID NO: 21933 - RNA, 20 nt, synthetic construct
  source 1..20: mol_type = other RNA
agtgtctagtagagtgcctg

SEQ ID NO: 21934 - RNA, 20 nt, synthetic construct
  source 1..20: mol_type = other RNA
agtgtgcagtggtgagatct

SEQ ID NO: 21935 - RNA, 20 nt, synthetic construct
  source 1..20: mol_type = other RNA
agtgtttacatttggtcatc

SEQ ID NO: 21936 - RNA, 20 nt, synthetic construct
  source 1..20: mol_type = other RNA
agttagccccaagtgaaata

SEQ ID NO: 21937 - RNA, 20 nt, synthetic construct
  source 1..20: mol_type = other RNA
agttcataatagcccccatc

SEQ ID NO: 21938 - RNA, 20 nt, synthetic construct
  source 1..20: mol_type = other RNA
agttcatttctcagttcata

SEQ ID NO: 21939 - RNA, 20 nt, synthetic construct
  source 1..20: mol_type = other RNA
agtttagaaaatcagatggg

SEQ ID NO: 21940 - RNA, 20 nt, synthetic construct
  source 1..20: mol_type = other RNA
ataaaccgtgacttggtatc

SEQ ID NO: 21941 - RNA, 20 nt, synthetic construct
  source 1..20: mol_type = other RNA
ataaagaacataccttgggt

SEQ ID NO: 21942 - RNA, 20 nt, synthetic construct
  source 1..20: mol_type = other RNA
ataacatctgccacgtatag

SEQ ID NO: 21943 - RNA, 20 nt, synthetic construct
  source 1..20: mol_type = other RNA
ataacatgagtaatttgatg

SEQ ID NO: 21944 - RNA, 20 nt, synthetic construct
  source 1..20: mol_type = other RNA
ataataacatctgccacgta

SEQ ID NO: 21945 - RNA, 20 nt, synthetic construct
  source 1..20: mol_type = other RNA
ataatagcccccatcaaatt

SEQ ID NO: 21946 - RNA, 20 nt, synthetic construct
  source 1..20: mol_type = other RNA
ataattcctctatacatgcc

SEQ ID NO: 21947 - RNA, 20 nt, synthetic construct
  source 1..20: mol_type = other RNA
atacagtttagaaaatcaga

SEQ ID NO: 21948 - RNA, 20 nt, synthetic construct
  source 1..20: mol_type = other RNA
atacatgccttttttgtttt

SEQ ID NO: 21949 - RNA, 20 nt, synthetic construct
  source 1..20: mol_type = other RNA
ataccaagtcacggtttatt

SEQ ID NO: 21950 - RNA, 20 nt, synthetic construct
  source 1..20: mol_type = other RNA
ataccctggcaatattaatg

SEQ ID NO: 21951 - RNA, 20 nt, synthetic construct
  source 1..20: mol_type = other RNA
ataccttgggttgatccact

SEQ ID NO: 21952 - RNA, 20 nt, synthetic construct
  source 1..20: mol_type = other RNA
atacgtggcagatgttatta

SEQ ID NO: 21953 - RNA, 20 nt, synthetic construct
  source 1..20: mol_type = other RNA
atactgctagaaatctgcta

SEQ ID NO: 21954 - RNA, 20 nt, synthetic construct
  source 1..20: mol_type = other RNA
atagagcaattgctatgtcc

SEQ ID NO: 21955 - RNA, 20 nt, synthetic construct
  source 1..20: mol_type = other RNA
atagaggaattatgagggaa

SEQ ID NO: 21956 - RNA, 20 nt, synthetic construct
  source 1..20: mol_type = other RNA
atagcaattgctctatacgt

SEQ ID NO: 21957 - RNA, 20 nt, synthetic construct
  source 1..20: mol_type = other RNA
atagcattccttaacacatc

SEQ ID NO: 21958 - RNA, 20 nt, synthetic construct
  source 1..20: mol_type = other RNA
atagcccccatcaaattact

SEQ ID NO: 21959 - RNA, 20 nt, synthetic construct
  source 1..20: mol_type = other RNA
atagcttgacaccaagttag

SEQ ID NO: 21960 - RNA, 20 nt, synthetic construct
  source 1..20: mol_type = other RNA
atatagcttgacaccaagtt

SEQ ID NO: 21961 - RNA, 20 nt, synthetic construct
  source 1..20: mol_type = other RNA
atatcaggcaccaagtgttt

SEQ ID NO: 21962 - RNA, 20 nt, synthetic construct
  source 1..20: mol_type = other RNA
atatcgggaaaagacacatt

SEQ ID NO: 21963 - RNA, 20 nt, synthetic construct
  source 1..20: mol_type = other RNA
atattaatgtgtcttttccc

SEQ ID NO: 21964 - RNA, 20 nt, synthetic construct
  source 1..20: mol_type = other RNA
atattgccagggtatttcac

SEQ ID NO: 21965 - RNA, 20 nt, synthetic construct
  source 1..20: mol_type = other RNA
atcaacccaaggtatgttct

SEQ ID NO: 21966 - RNA, 20 nt, synthetic construct
  source 1..20: mol_type = other RNA
atcaaggcaggagcaggaac

SEQ ID NO: 21967 - RNA, 20 nt, synthetic construct
  source 1..20: mol_type = other RNA
atcactcaagagtctacatg

SEQ ID NO: 21968 - RNA, 20 nt, synthetic construct
  source 1..20: mol_type = other RNA
atcagaagtccttgagagcc

SEQ ID NO: 21969 - RNA, 20 nt, synthetic construct
  source 1..20: mol_type = other RNA
atcagatgggtgtagatcaa

SEQ ID NO: 21970 - RNA, 20 nt, synthetic construct
  source 1..20: mol_type = other RNA
atcaggcaccaagtgtttac

SEQ ID NO: 21971 - RNA, 20 nt, synthetic construct
  source 1..20: mol_type = other RNA
atcatgtagactcttgagtg

SEQ ID NO: 21972 - RNA, 20 nt, synthetic construct
  source 1..20: mol_type = other RNA
atccacttaggaacctcaga

SEQ ID NO: 21973 - RNA, 20 nt, synthetic construct
  source 1..20: mol_type = other RNA
atcgatgaccaaatgtaaac

SEQ ID NO: 21974 - RNA, 20 nt, synthetic construct
  source 1..20: mol_type = other RNA
atcgatttctcccaattcca

SEQ ID NO: 21975 - RNA, 20 nt, synthetic construct
  source 1..20: mol_type = other RNA
atcgggaaaagacacattaa

SEQ ID NO: 21976 - RNA, 20 nt, synthetic construct
  source 1..20: mol_type = other RNA
atctacacccatctgatttt

SEQ ID NO: 21977 - RNA, 20 nt, synthetic construct
  source 1..20: mol_type = other RNA
atctcaccactgcacactgc

SEQ ID NO: 21978 - RNA, 20 nt, synthetic construct
  source 1..20: mol_type = other RNA
atctccagtgacagaagata

SEQ ID NO: 21979 - RNA, 20 nt, synthetic construct
  source 1..20: mol_type = other RNA
atctgaggttcctaagtgga

SEQ ID NO: 21980 - RNA, 20 nt, synthetic construct
  source 1..20: mol_type = other RNA
atctgattttctaaactgta

SEQ ID NO: 21981 - RNA, 20 nt, synthetic construct
  source 1..20: mol_type = other RNA
atctgccacgtatagagcaa

SEQ ID NO: 21982 - RNA, 20 nt, synthetic construct
  source 1..20: mol_type = other RNA
atcttctgtcactggagatt

SEQ ID NO: 21983 - RNA, 20 nt, synthetic construct
  source 1..20: mol_type = other RNA
atcttggggccaaatcatgt

SEQ ID NO: 21984 - RNA, 20 nt, synthetic construct
  source 1..20: mol_type = other RNA
atctttccctcataattcct

SEQ ID NO: 21985 - RNA, 20 nt, synthetic construct
  source 1..20: mol_type = other RNA
atgaactgagaaatgaactt

SEQ ID NO: 21986 - RNA, 20 nt, synthetic construct
  source 1..20: mol_type = other RNA
atgaactttgaaaagtatct

SEQ ID NO: 21987 - RNA, 20 nt, synthetic construct
  source 1..20: mol_type = other RNA
atgaagtgtctagtagagtg

SEQ ID NO: 21988 - RNA, 20 nt, synthetic construct
  source 1..20: mol_type = other RNA
atgaccaaatgtaaacactt

SEQ ID NO: 21989 - RNA, 20 nt, synthetic construct
  source 1..20: mol_type = other RNA
atgagattccatcccaaaaa

SEQ ID NO: 21990 - RNA, 20 nt, synthetic construct
  source 1..20: mol_type = other RNA
atgagcttccaccttcccaa

SEQ ID NO: 21991 - RNA, 20 nt, synthetic construct
  source 1..20: mol_type = other RNA
atgagggaaagataccaagt

SEQ ID NO: 21992 - RNA, 20 nt, synthetic construct
  source 1..20: mol_type = other RNA
atgagtaatttgatgggggc

SEQ ID NO: 21993 - RNA, 20 nt, synthetic construct
  source 1..20: mol_type = other RNA
atgagtgctgagagggcatc

SEQ ID NO: 21994 - RNA, 20 nt, synthetic construct
  source 1..20: mol_type = other RNA
atgatttggccccaagatac

SEQ ID NO: 21995 - RNA, 20 nt, synthetic construct
  source 1..20: mol_type = other RNA
atgcagcgcaatctccagtg

SEQ ID NO: 21996 - RNA, 20 nt, synthetic construct
  source 1..20: mol_type = other RNA
atgccctctcagcactcata

SEQ ID NO: 21997 - RNA, 20 nt, synthetic construct
  source 1..20: mol_type = other RNA
atgcctttctttttggttcc

SEQ ID NO: 21998 - RNA, 20 nt, synthetic construct
  source 1..20: mol_type = other RNA
atgctatgagtgctgagagg

SEQ ID NO: 21999 - RNA, 20 nt, synthetic construct
  source 1..20: mol_type = other RNA
atggaaggggtggaaacaga

SEQ ID NO: 22000 - RNA, 20 nt, synthetic construct
  source 1..20: mol_type = other RNA
atggaatctcattccattgc

SEQ ID NO: 22001 - RNA, 20 nt, synthetic construct
  source 1..20: mol_type = other RNA
atggaatgagattccatccc

SEQ ID NO: 22002 - RNA, 20 nt, synthetic construct
  source 1..20: mol_type = other RNA
atggaattgggagaaatcga

SEQ ID NO: 22003 - RNA, 20 nt, synthetic construct
  source 1..20: mol_type = other RNA
atggaggtggcttgttggga

SEQ ID NO: 22004 - RNA, 20 nt, synthetic construct
  source 1..20: mol_type = other RNA
atgggggctattatgaactg

SEQ ID NO: 22005 - RNA, 20 nt, synthetic construct
  source 1..20: mol_type = other RNA
atgggtgtagatcaaggcag

SEQ ID NO: 22006 - RNA, 20 nt, synthetic construct
  source 1..20: mol_type = other RNA
atgtaaacacttggtgcctg

SEQ ID NO: 22007 - RNA, 20 nt, synthetic construct
  source 1..20: mol_type = other RNA
atgtagactcttgagtgatg

SEQ ID NO: 22008 - RNA, 20 nt, synthetic construct
  source 1..20: mol_type = other RNA
atgtatagaggaattatgag

SEQ ID NO: 22009 - RNA, 20 nt, synthetic construct
  source 1..20: mol_type = other RNA
atgtcccaggcactctacta

SEQ ID NO: 22010 - RNA, 20 nt, synthetic construct
  source 1..20: mol_type = other RNA
atgtgttaaggaatgctatg

SEQ ID NO: 22011 - RNA, 20 nt, synthetic construct
  source 1..20: mol_type = other RNA
atgttattatctgaggttcc

SEQ ID NO: 22012 - RNA, 20 nt, synthetic construct
  source 1..20: mol_type = other RNA
atgttattgtactctgtttc

SEQ ID NO: 22013 - RNA, 20 nt, synthetic construct
  source 1..20: mol_type = other RNA
atgtttatgcctttcttttt

SEQ ID NO: 22014 - RNA, 20 nt, synthetic construct
  source 1..20: mol_type = other RNA
attaatattgccagggtatt

SEQ ID NO: 22015 - RNA, 20 nt, synthetic construct
  source 1..20: mol_type = other RNA
attaatgtgtcttttcccga

SEQ ID NO: 22016 - RNA, 20 nt, synthetic construct
  source 1..20: mol_type = other RNA
attactcatgttattgtact

SEQ ID NO: 22017 - RNA, 20 nt, synthetic construct
  source 1..20: mol_type = other RNA
attatctgaggttcctaagt

SEQ ID NO: 22018 - RNA, 20 nt, synthetic construct
  source 1..20: mol_type = other RNA
attatgaactgagaaatgaa

SEQ ID NO: 22019 - RNA, 20 nt, synthetic construct
  source 1..20: mol_type = other RNA
attatgagggaaagatacca

SEQ ID NO: 22020 - RNA, 20 nt, synthetic construct
  source 1..20: mol_type = other RNA
attccatcccaaaaaataaa

SEQ ID NO: 22021 - RNA, 20 nt, synthetic construct
  source 1..20: mol_type = other RNA
attccatttccactctggcc

SEQ ID NO: 22022 - RNA, 20 nt, synthetic construct
  source 1..20: mol_type = other RNA
attcctctatacatgccttt

SEQ ID NO: 22023 - RNA, 20 nt, synthetic construct
  source 1..20: mol_type = other RNA
attcctgggactacaggcac

SEQ ID NO: 22024 - RNA, 20 nt, synthetic construct
  source 1..20: mol_type = other RNA
attccttaacacatcactca

SEQ ID NO: 22025 - RNA, 20 nt, synthetic construct
  source 1..20: mol_type = other RNA
attcttcaaaatggaggtgg

SEQ ID NO: 22026 - RNA, 20 nt, synthetic construct
  source 1..20: mol_type = other RNA
attgccagggtatttcactt

SEQ ID NO: 22027 - RNA, 20 nt, synthetic construct
  source 1..20: mol_type = other RNA
attgcccaggctggagtgca

SEQ ID NO: 22028 - RNA, 20 nt, synthetic construct
  source 1..20: mol_type = other RNA
attgcgctgcatttttaaga

SEQ ID NO: 22029 - RNA, 20 nt, synthetic construct
  source 1..20: mol_type = other RNA
attgctatgtcccaggcact

SEQ ID NO: 22030 - RNA, 20 nt, synthetic construct
  source 1..20: mol_type = other RNA
attgctctatacgtggcaga

SEQ ID NO: 22031 - RNA, 20 nt, synthetic construct
  source 1..20: mol_type = other RNA
attgggagaaatcgatgacc

SEQ ID NO: 22032 - RNA, 20 nt, synthetic construct
  source 1..20: mol_type = other RNA
attgtactctgtttccaccc

SEQ ID NO: 22033 - RNA, 20 nt, synthetic construct
  source 1..20: mol_type = other RNA
atttcacttggggctaactt

SEQ ID NO: 22034 - RNA, 20 nt, synthetic construct
  source 1..20: mol_type = other RNA
atttccactctggccaaatg

SEQ ID NO: 22035 - RNA, 20 nt, synthetic construct
  source 1..20: mol_type = other RNA
atttctagcagtatcttctg

SEQ ID NO: 22036 - RNA, 20 nt, synthetic construct
  source 1..20: mol_type = other RNA
atttctcagttcataatagc

SEQ ID NO: 22037 - RNA, 20 nt, synthetic construct
  source 1..20: mol_type = other RNA
atttctcccaattccatttc

SEQ ID NO: 22038 - RNA, 20 nt, synthetic construct
  source 1..20: mol_type = other RNA
atttgatgggggctattatg

SEQ ID NO: 22039 - RNA, 20 nt, synthetic construct
  source 1..20: mol_type = other RNA
atttggccagagtggaaatg

SEQ ID NO: 22040 - RNA, 20 nt, synthetic construct
  source 1..20: mol_type = other RNA
atttggccccaagatacttt

SEQ ID NO: 22041 - RNA, 20 nt, synthetic construct
  source 1..20: mol_type = other RNA
atttggtcatcgatttctcc

SEQ ID NO: 22042 - RNA, 20 nt, synthetic construct
  source 1..20: mol_type = other RNA
attttctaaactgtatgaag

SEQ ID NO: 22043 - RNA, 20 nt, synthetic construct
  source 1..20: mol_type = other RNA
attttgaagaataaaccgtg

SEQ ID NO: 22044 - RNA, 20 nt, synthetic construct
  source 1..20: mol_type = other RNA
atttttaagagcctttctct

SEQ ID NO: 22045 - RNA, 20 nt, synthetic construct
  source 1..20: mol_type = other RNA
attttttgggatggaatctc

SEQ ID NO: 22046 - RNA, 20 nt, synthetic construct
  source 1..20: mol_type = other RNA
caaaaaaggcatgtatagag

SEQ ID NO: 22047 - RNA, 20 nt, synthetic construct
  source 1..20: mol_type = other RNA
caaaaagaaaggcataaaca

SEQ ID NO: 22048 - RNA, 20 nt, synthetic construct
  source 1..20: mol_type = other RNA
caaaatggaggtggcttgtt

SEQ ID NO: 22049 - RNA, 20 nt, synthetic construct
  source 1..20: mol_type = other RNA
caaagttcatttctcagttc

SEQ ID NO: 22050 - RNA, 20 nt, synthetic construct
  source 1..20: mol_type = other RNA
caaatcatgtagactcttga

SEQ ID NO: 22051 - RNA, 20 nt, synthetic construct
  source 1..20: mol_type = other RNA
caaatgagcttccaccttcc

SEQ ID NO: 22052 - RNA, 20 nt, synthetic construct
  source 1..20: mol_type = other RNA
caaatgtaaacacttggtgc

SEQ ID NO: 22053 - RNA, 20 nt, synthetic construct
  source 1..20: mol_type = other RNA
caaattactcatgttattgt

SEQ ID NO: 22054 - RNA, 20 nt, synthetic construct
  source 1..20: mol_type = other RNA
caacaagccacctccatttt

SEQ ID NO: 22055 - RNA, 20 nt, synthetic construct
  source 1..20: mol_type = other RNA
caacccaaggtatgttcttt

SEQ ID NO: 22056 - RNA, 20 nt, synthetic construct
  source 1..20: mol_type = other RNA
caacttcaagtgatcagcct

SEQ ID NO: 22057 - RNA, 20 nt, synthetic construct
  source 1..20: mol_type = other RNA
caagagtctacatgatttgg

SEQ ID NO: 22058 - RNA, 20 nt, synthetic construct
  source 1..20: mol_type = other RNA
caagatacttttcaaagttc

SEQ ID NO: 22059 - RNA, 20 nt, synthetic construct
  source 1..20: mol_type = other RNA
caagccacctccattttgaa

SEQ ID NO: 22060 - RNA, 20 nt, synthetic construct
  source 1..20: mol_type = other RNA
caagctatatcaggcaccaa

SEQ ID NO: 22061 - RNA, 20 nt, synthetic construct
  source 1..20: mol_type = other RNA
caaggacttctgatgccctc

SEQ ID NO: 22062 - RNA, 20 nt, synthetic construct
  source 1..20: mol_type = other RNA
caaggcaggagcaggaacca

SEQ ID NO: 22063 - RNA, 20 nt, synthetic construct
  source 1..20: mol_type = other RNA
caaggcaggctgatcacttg

SEQ ID NO: 22064 - RNA, 20 nt, synthetic construct
  source 1..20: mol_type = other RNA
caaggtatgttctttatttt

SEQ ID NO: 22065 - RNA, 20 nt, synthetic construct
  source 1..20: mol_type = other RNA
caagtcacggtttattcttc

SEQ ID NO: 22066 - RNA, 20 nt, synthetic construct
  source 1..20: mol_type = other RNA
caagtgaaataccctggcaa

SEQ ID NO: 22067 - RNA, 20 nt, synthetic construct
  source 1..20: mol_type = other RNA
caagtgattcctgggactac

SEQ ID NO: 22068 - RNA, 20 nt, synthetic construct
  source 1..20: mol_type = other RNA
caagtgtttacatttggtca

SEQ ID NO: 22069 - RNA, 20 nt, synthetic construct
  source 1..20: mol_type = other RNA
caagttagccccaagtgaaa

SEQ ID NO: 22070 - RNA, 20 nt, synthetic construct
  source 1..20: mol_type = other RNA
caataacatgagtaatttga

SEQ ID NO: 22071 - RNA, 20 nt, synthetic construct
  source 1..20: mol_type = other RNA
caatattaatgtgtcttttc

SEQ ID NO: 22072 - RNA, 20 nt, synthetic construct
  source 1..20: mol_type = other RNA
caatctccagtgacagaaga

SEQ ID NO: 22073 - RNA, 20 nt, synthetic construct
  source 1..20: mol_type = other RNA
caatggaatgagattccatc

SEQ ID NO: 22074 - RNA, 20 nt, synthetic construct
  source 1..20: mol_type = other RNA
caattccatttccactctgg

SEQ ID NO: 22075 - RNA, 20 nt, synthetic construct
  source 1..20: mol_type = other RNA
caattgctatgtcccaggca

SEQ ID NO: 22076 - RNA, 20 nt, synthetic construct
  source 1..20: mol_type = other RNA
caattgctctatacgtggca

SEQ ID NO: 22077 - RNA, 20 nt, synthetic construct
  source 1..20: mol_type = other RNA
cacactgcactccagcctgg

SEQ ID NO: 22078 - RNA, 20 nt, synthetic construct
  source 1..20: mol_type = other RNA
cacatcactcaagagtctac

SEQ ID NO: 22079 - RNA, 20 nt, synthetic construct
  source 1..20: mol_type = other RNA
cacattaatattgccagggt

SEQ ID NO: 22080 - RNA, 20 nt, synthetic construct
  source 1..20: mol_type = other RNA
caccaagtgtttacatttgg

SEQ ID NO: 22081 - RNA, 20 nt, synthetic construct
  source 1..20: mol_type = other RNA
caccaagttagccccaagtg

SEQ ID NO: 22082 - RNA, 20 nt, synthetic construct
  source 1..20: mol_type = other RNA
cacccatctgattttctaaa

SEQ ID NO: 22083 - RNA, 20 nt, synthetic construct
  source 1..20: mol_type = other RNA
cacctccattttgaagaata

SEQ ID NO: 22084 - RNA, 20 nt, synthetic construct
  source 1..20: mol_type = other RNA
caccttcccaacaagccacc

SEQ ID NO: 22085 - RNA, 20 nt, synthetic construct
  source 1..20: mol_type = other RNA
cacggtttattcttcaaaat

SEQ ID NO: 22086 - RNA, 20 nt, synthetic construct
  source 1..20: mol_type = other RNA
cacgtatagagcaattgcta

SEQ ID NO: 22087 - RNA, 20 nt, synthetic construct
  source 1..20: mol_type = other RNA
cactcaagagtctacatgat

SEQ ID NO: 22088 - RNA, 20 nt, synthetic construct
  source 1..20: mol_type = other RNA
cactcatagcattccttaac

SEQ ID NO: 22089 - RNA, 20 nt, synthetic construct
  source 1..20: mol_type = other RNA
cactctactagacacttcat

SEQ ID NO: 22090 - RNA, 20 nt, synthetic construct
  source 1..20: mol_type = other RNA
cactctggccaaatgagctt

SEQ ID NO: 22091 - RNA, 20 nt, synthetic construct
  source 1..20: mol_type = other RNA
cactggagattgcgctgcat

SEQ ID NO: 22092 - RNA, 20 nt, synthetic construct
  source 1..20: mol_type = other RNA
cacttaggaacctcagataa

SEQ ID NO: 22093 - RNA, 20 nt, synthetic construct
  source 1..20: mol_type = other RNA
cacttcatacagtttagaaa

SEQ ID NO: 22094 - RNA, 20 nt, synthetic construct
  source 1..20: mol_type = other RNA
cacttggggctaacttggtg

SEQ ID NO: 22095 - RNA, 20 nt, synthetic construct
  source 1..20: mol_type = other RNA
cacttggtgcctgatatagc

SEQ ID NO: 22096 - RNA, 20 nt, synthetic construct
  source 1..20: mol_type = other RNA
cagaagatactgctagaaat

SEQ ID NO: 22097 - RNA, 20 nt, synthetic construct
  source 1..20: mol_type = other RNA
cagaagtccttgagagcctc

SEQ ID NO: 22098 - RNA, 20 nt, synthetic construct
  source 1..20: mol_type = other RNA
cagagaaaggctcttaaaaa

SEQ ID NO: 22099 - RNA, 20 nt, synthetic construct
  source 1..20: mol_type = other RNA
cagagtacaataacatgagt

SEQ ID NO: 22100 - RNA, 20 nt, synthetic construct
  source 1..20: mol_type = other RNA
cagagtggaaatggaattgg

SEQ ID NO: 22101 - RNA, 20 nt, synthetic construct
  source 1..20: mol_type = other RNA
cagataataacatctgccac

SEQ ID NO: 22102 - RNA, 20 nt, synthetic construct
  source 1..20: mol_type = other RNA
cagatgggtgtagatcaagg

SEQ ID NO: 22103 - RNA, 20 nt, synthetic construct
  source 1..20: mol_type = other RNA
cagatgttattatctgaggt

SEQ ID NO: 22104 - RNA, 20 nt, synthetic construct
  source 1..20: mol_type = other RNA
cagatttctagcagtatctt

SEQ ID NO: 22105 - RNA, 20 nt, synthetic construct
  source 1..20: mol_type = other RNA
cagcactcatagcattcctt

SEQ ID NO: 22106 - RNA, 20 nt, synthetic construct
  source 1..20: mol_type = other RNA
cagcctgggcaatggaatga

SEQ ID NO: 22107 - RNA, 20 nt, synthetic construct
  source 1..20: mol_type = other RNA
cagcgcaatctccagtgaca

SEQ ID NO: 22108 - RNA, 20 nt, synthetic construct
  source 1..20: mol_type = other RNA
caggaaccaaaaagaaaggc

SEQ ID NO: 22109 - RNA, 20 nt, synthetic construct
  source 1..20: mol_type = other RNA
caggagcaggaaccaaaaag

SEQ ID NO: 22110 - RNA, 20 nt, synthetic construct
  source 1..20: mol_type = other RNA
caggcaccaagtgtttacat

SEQ ID NO: 22111 - RNA, 20 nt, synthetic construct
  source 1..20: mol_type = other RNA
caggcactctactagacact

SEQ ID NO: 22112 - RNA, 20 nt, synthetic construct
  source 1..20: mol_type = other RNA
caggctgatcacttgaagtt

SEQ ID NO: 22113 - RNA, 20 nt, synthetic construct
  source 1..20: mol_type = other RNA
caggctggagtgcagtgtgc

SEQ ID NO: 22114 - RNA, 20 nt, synthetic construct
  source 1..20: mol_type = other RNA
cagggtatttcacttggggc

SEQ ID NO: 22115 - RNA, 20 nt, synthetic construct
  source 1..20: mol_type = other RNA
cagtatcttctgtcactgga

SEQ ID NO: 22116 - RNA, 20 nt, synthetic construct
  source 1..20: mol_type = other RNA
cagtgacagaagatactgct

SEQ ID NO: 22117 - RNA, 20 nt, synthetic construct
  source 1..20: mol_type = other RNA
cagtgtgcagtggtgagatc

SEQ ID NO: 22118 - RNA, 20 nt, synthetic construct
  source 1..20: mol_type = other RNA
cagttcataatagcccccat

SEQ ID NO: 22119 - RNA, 20 nt, synthetic construct
  source 1..20: mol_type = other RNA
cagtttagaaaatcagatgg

SEQ ID NO: 22120 - RNA, 20 nt, synthetic construct
  source 1..20: mol_type = other RNA
cataatagcccccatcaaat

SEQ ID NO: 22121 - RNA, 20 nt, synthetic construct
  source 1..20: mol_type = other RNA
cataattcctctatacatgc

SEQ ID NO: 22122 - RNA, 20 nt, synthetic construct
  source 1..20: mol_type = other RNA
catacagtttagaaaatcag

SEQ ID NO: 22123 - RNA, 20 nt, synthetic construct
  source 1..20: mol_type = other RNA
cataccttgggttgatccac

SEQ ID NO: 22124 - RNA, 20 nt, synthetic construct
  source 1..20: mol_type = other RNA
catagcaattgctctatacg

SEQ ID NO: 22125 - RNA, 20 nt, synthetic construct
  source 1..20: mol_type = other RNA
catagcattccttaacacat

SEQ ID NO: 22126 - RNA, 20 nt, synthetic construct
  source 1..20: mol_type = other RNA
catcaaattactcatgttat

SEQ ID NO: 22127 - RNA, 20 nt, synthetic construct
  source 1..20: mol_type = other RNA
catcactcaagagtctacat

SEQ ID NO: 22128 - RNA, 20 nt, synthetic construct
  source 1..20: mol_type = other RNA
catcagaagtccttgagagc

SEQ ID NO: 22129 - RNA, 20 nt, synthetic construct
  source 1..20: mol_type = other RNA
catcgatttctcccaattcc

SEQ ID NO: 22130 - RNA, 20 nt, synthetic construct
  source 1..20: mol_type = other RNA
catctgattttctaaactgt

SEQ ID NO: 22131 - RNA, 20 nt, synthetic construct
  source 1..20: mol_type = other RNA
catctgccacgtatagagca

SEQ ID NO: 22132 - RNA, 20 nt, synthetic construct
  source 1..20: mol_type = other RNA
catgagtaatttgatggggg

SEQ ID NO: 22133 - RNA, 20 nt, synthetic construct
  source 1..20: mol_type = other RNA
catgatttggccccaagata

SEQ ID NO: 22134 - RNA, 20 nt, synthetic construct
  source 1..20: mol_type = other RNA
catgtagactcttgagtgat

SEQ ID NO: 22135 - RNA, 20 nt, synthetic construct
  source 1..20: mol_type = other RNA
catgtatagaggaattatga

SEQ ID NO: 22136 - RNA, 20 nt, synthetic construct
  source 1..20: mol_type = other RNA
catgttattgtactctgttt

SEQ ID NO: 22137 - RNA, 20 nt, synthetic construct
  source 1..20: mol_type = other RNA
cattaatattgccagggtat

SEQ ID NO: 22138 - RNA, 20 nt, synthetic construct
  source 1..20: mol_type = other RNA
cattccttaacacatcactc

SEQ ID NO: 22139 - RNA, 20 nt, synthetic construct
  source 1..20: mol_type = other RNA
catttccactctggccaaat

SEQ ID NO: 22140 - RNA, 20 nt, synthetic construct
  source 1..20: mol_type = other RNA
catttctcagttcataatag

SEQ ID NO: 22141 - RNA, 20 nt, synthetic construct
  source 1..20: mol_type = other RNA
catttggccagagtggaaat

SEQ ID NO: 22142 - RNA, 20 nt, synthetic construct
  source 1..20: mol_type = other RNA
catttggtcatcgatttctc

SEQ ID NO: 22143 - RNA, 20 nt, synthetic construct
  source 1..20: mol_type = other RNA
cattttgaagaataaaccgt

SEQ ID NO: 22144 - RNA, 20 nt, synthetic construct
  source 1..20: mol_type = other RNA
catttttaagagcctttctc

SEQ ID NO: 22145 - RNA, 20 nt, synthetic construct
  source 1..20: mol_type = other RNA
ccaaaaagaaaggcataaac

SEQ ID NO: 22146 - RNA, 20 nt, synthetic construct
  source 1..20: mol_type = other RNA
ccaaatcatgtagactcttg

SEQ ID NO: 22147 - RNA, 20 nt, synthetic construct
  source 1..20: mol_type = other RNA
ccaaatgagcttccaccttc

SEQ ID NO: 22148 - RNA, 20 nt, synthetic construct
  source 1..20: mol_type = other RNA
ccaaatgtaaacacttggtg

SEQ ID NO: 22149 - RNA, 20 nt, synthetic construct
  source 1..20: mol_type = other RNA
ccaacaagccacctccattt

SEQ ID NO: 22150 - RNA, 20 nt, synthetic construct
  source 1..20: mol_type = other RNA
ccaacttcaagtgatcagcc

SEQ ID NO: 22151 - RNA, 20 nt, synthetic construct
  source 1..20: mol_type = other RNA
ccaagatacttttcaaagtt

SEQ ID NO: 22152 - RNA, 20 nt, synthetic construct
  source 1..20: mol_type = other RNA
ccaaggcaggctgatcactt

SEQ ID NO: 22153 - RNA, 20 nt, synthetic construct
  source 1..20: mol_type = other RNA
ccaaggtatgttctttattt

SEQ ID NO: 22154 - RNA, 20 nt, synthetic construct
  source 1..20: mol_type = other RNA
ccaagtcacggtttattctt

SEQ ID NO: 22155 - RNA, 20 nt, synthetic construct
  source 1..20: mol_type = other RNA
ccaagtgaaataccctggca

SEQ ID NO: 22156 - RNA, 20 nt, synthetic construct
  source 1..20: mol_type = other RNA
ccaagtgtttacatttggtc

SEQ ID NO: 22157 - RNA, 20 nt, synthetic construct
  source 1..20: mol_type = other RNA
ccaagttagccccaagtgaa

SEQ ID NO: 22158 - RNA, 20 nt, synthetic construct
  source 1..20: mol_type = other RNA
ccaattccatttccactctg

SEQ ID NO: 22159 - RNA, 20 nt, synthetic construct
  source 1..20: mol_type = other RNA
ccacctccattttgaagaat

SEQ ID NO: 22160 - RNA, 20 nt, synthetic construct
  source 1..20: mol_type = other RNA
ccaccttcccaacaagccac

SEQ ID NO: 22161 - RNA, 20 nt, synthetic construct
  source 1..20: mol_type = other RNA
ccacgtatagagcaattgct

SEQ ID NO: 22162 - RNA, 20 nt, synthetic construct
  source 1..20: mol_type = other RNA
ccactctggccaaatgagct

SEQ ID NO: 22163 - RNA, 20 nt, synthetic construct
  source 1..20: mol_type = other RNA
ccacttaggaacctcagata

SEQ ID NO: 22164 - RNA, 20 nt, synthetic construct
  source 1..20: mol_type = other RNA
ccagagaaaggctcttaaaa

SEQ ID NO: 22165 - RNA, 20 nt, synthetic construct
  source 1..20: mol_type = other RNA
ccagagtggaaatggaattg

SEQ ID NO: 22166 - RNA, 20 nt, synthetic construct
  source 1..20: mol_type = other RNA
ccagcctgggcaatggaatg

SEQ ID NO: 22167 - RNA, 20 nt, synthetic construct
  source 1..20: mol_type = other RNA
ccaggcactctactagacac

SEQ ID NO: 22168 - RNA, 20 nt, synthetic construct
  source 1..20: mol_type = other RNA
ccagggtatttcacttgggg

SEQ ID NO: 22169 - RNA, 20 nt, synthetic construct
  source 1..20: mol_type = other RNA
ccagtgacagaagatactgc

SEQ ID NO: 22170 - RNA, 20 nt, synthetic construct
  source 1..20: mol_type = other RNA
ccatcaaattactcatgtta

SEQ ID NO: 22171 - RNA, 20 nt, synthetic construct
  source 1..20: mol_type = other RNA
ccatctgattttctaaactg

SEQ ID NO: 22172 - RNA, 20 nt, synthetic construct
  source 1..20: mol_type = other RNA
ccattgcccaggctggagtg

SEQ ID NO: 22173 - RNA, 20 nt, synthetic construct
  source 1..20: mol_type = other RNA
ccatttccactctggccaaa

SEQ ID NO: 22174 - RNA, 20 nt, synthetic construct
  source 1..20: mol_type = other RNA
ccattttgaagaataaaccg

SEQ ID NO: 22175 - RNA, 20 nt, synthetic construct
  source 1..20: mol_type = other RNA
cccaacaagccacctccatt

SEQ ID NO: 22176 - RNA, 20 nt, synthetic construct
  source 1..20: mol_type = other RNA
cccaacttcaagtgatcagc

SEQ ID NO: 22177 - RNA, 20 nt, synthetic construct
  source 1..20: mol_type = other RNA
cccaagatacttttcaaagt

SEQ ID NO: 22178 - RNA, 20 nt, synthetic construct
  source 1..20: mol_type = other RNA
cccaaggtatgttctttatt

SEQ ID NO: 22179 - RNA, 20 nt, synthetic construct
  source 1..20: mol_type = other RNA
cccaagtgaaataccctggc

SEQ ID NO: 22180 - RNA, 20 nt, synthetic construct
  source 1..20: mol_type = other RNA
cccaattccatttccactct

SEQ ID NO: 22181 - RNA, 20 nt, synthetic construct
  source 1..20: mol_type = other RNA
cccaggaatcacttgaaccc

SEQ ID NO: 22182 - RNA, 20 nt, synthetic construct
  source 1..20: mol_type = other RNA
cccaggcactctactagaca

SEQ ID NO: 22183 - RNA, 20 nt, synthetic construct
  source 1..20: mol_type = other RNA
cccatcaaattactcatgtt

SEQ ID NO: 22184 - RNA, 20 nt, synthetic construct
  source 1..20: mol_type = other RNA
cccatctgattttctaaact

SEQ ID NO: 22185 - RNA, 20 nt, synthetic construct
  source 1..20: mol_type = other RNA
ccccaagatacttttcaaag

SEQ ID NO: 22186 - RNA, 20 nt, synthetic construct
  source 1..20: mol_type = other RNA
ccccaagtgaaataccctgg

SEQ ID NO: 22187 - RNA, 20 nt, synthetic construct
  source 1..20: mol_type = other RNA
ccccatcaaattactcatgt

SEQ ID NO: 22188 - RNA, 20 nt, synthetic construct
  source 1..20: mol_type = other RNA
cccccatcaaattactcatg

SEQ ID NO: 22189 - RNA, 20 nt, synthetic construct
  source 1..20: mol_type = other RNA
ccctcataattcctctatac

SEQ ID NO: 22190 - RNA, 20 nt, synthetic construct
  source 1..20: mol_type = other RNA
ccctctcagcactcatagca

SEQ ID NO: 22191 - RNA, 20 nt, synthetic construct
  source 1..20: mol_type = other RNA
ccctggcaatattaatgtgt

SEQ ID NO: 22192 - RNA, 20 nt, synthetic construct
  source 1..20: mol_type = other RNA
ccgtgacttggtatctttcc

SEQ ID NO: 22193 - RNA, 20 nt, synthetic construct
  source 1..20: mol_type = other RNA
cctaagtggatcaacccaag

SEQ ID NO: 22194 - RNA, 20 nt, synthetic construct
  source 1..20: mol_type = other RNA
cctcagataataacatctgc

SEQ ID NO: 22195 - RNA, 20 nt, synthetic construct
  source 1..20: mol_type = other RNA
cctcataattcctctataca

SEQ ID NO: 22196 - RNA, 20 nt, synthetic construct
  source 1..20: mol_type = other RNA
cctccagagaaaggctctta

SEQ ID NO: 22197 - RNA, 20 nt, synthetic construct
  source 1..20: mol_type = other RNA
cctccattttgaagaataaa

SEQ ID NO: 22198 - RNA, 20 nt, synthetic construct
  source 1..20: mol_type = other RNA
cctcctgggttcaagtgatt

SEQ ID NO: 22199 - RNA, 20 nt, synthetic construct
  source 1..20: mol_type = other RNA
cctctatacatgcctttttt

SEQ ID NO: 22200 - RNA, 20 nt, synthetic construct
  source 1..20: mol_type = other RNA
cctctcagcactcatagcat

SEQ ID NO: 22201 - RNA, 20 nt, synthetic construct
  source 1..20: mol_type = other RNA
cctgatatagcttgacacca

SEQ ID NO: 22202 - RNA, 20 nt, synthetic construct
  source 1..20: mol_type = other RNA
cctgccttgatctacaccca

SEQ ID NO: 22203 - RNA, 20 nt, synthetic construct
  source 1..20: mol_type = other RNA
cctgctcctgccttgatcta

SEQ ID NO: 22204 - RNA, 20 nt, synthetic construct
  source 1..20: mol_type = other RNA
cctggcaatattaatgtgtc

SEQ ID NO: 22205 - RNA, 20 nt, synthetic construct
  source 1..20: mol_type = other RNA
cctgggacatagcaattgct

SEQ ID NO: 22206 - RNA, 20 nt, synthetic construct
  source 1..20: mol_type = other RNA
cctgggcaatggaatgagat

SEQ ID NO: 22207 - RNA, 20 nt, synthetic construct
  source 1..20: mol_type = other RNA
cctgggttcaagtgattcct

SEQ ID NO: 22208 - RNA, 20 nt, synthetic construct
  source 1..20: mol_type = other RNA
cctgtagtcccaggaatcac

SEQ ID NO: 22209 - RNA, 20 nt, synthetic construct
  source 1..20: mol_type = other RNA
ccttaacacatcactcaaga

SEQ ID NO: 22210 - RNA, 20 nt, synthetic construct
  source 1..20: mol_type = other RNA
ccttcccaacaagccacctc

SEQ ID NO: 22211 - RNA, 20 nt, synthetic construct
  source 1..20: mol_type = other RNA
ccttgagagcctccagagaa

SEQ ID NO: 22212 - RNA, 20 nt, synthetic construct
  source 1..20: mol_type = other RNA
ccttgatctacacccatctg

SEQ ID NO: 22213 - RNA, 20 nt, synthetic construct
  source 1..20: mol_type = other RNA
ccttgggttgatccacttag

SEQ ID NO: 22214 - RNA, 20 nt, synthetic construct
  source 1..20: mol_type = other RNA
cctttctctggaggctctca

SEQ ID NO: 22215 - RNA, 20 nt, synthetic construct
  source 1..20: mol_type = other RNA
cctttctttttggttcctgc

SEQ ID NO: 22216 - RNA, 20 nt, synthetic construct
  source 1..20: mol_type = other RNA
cgatgaccaaatgtaaacac

SEQ ID NO: 22217 - RNA, 20 nt, synthetic construct
  source 1..20: mol_type = other RNA
cgatttctcccaattccatt

SEQ ID NO: 22218 - RNA, 20 nt, synthetic construct
  source 1..20: mol_type = other RNA
cgcaatctccagtgacagaa

SEQ ID NO: 22219 - RNA, 20 nt, synthetic construct
  source 1..20: mol_type = other RNA
cgcctcctgggttcaagtga

SEQ ID NO: 22220 - RNA, 20 nt, synthetic construct
  source 1..20: mol_type = other RNA
cgctgcatttttaagagcct

SEQ ID NO: 22221 - RNA, 20 nt, synthetic construct
  source 1..20: mol_type = other RNA
cgggaaaagacacattaata

SEQ ID NO: 22222 - RNA, 20 nt, synthetic construct
  source 1..20: mol_type = other RNA
cggtttattcttcaaaatgg

SEQ ID NO: 22223 - RNA, 20 nt, synthetic construct
  source 1..20: mol_type = other RNA
cgtatagagcaattgctatg

SEQ ID NO: 22224 - RNA, 20 nt, synthetic construct
  source 1..20: mol_type = other RNA
cgtgacttggtatctttccc

SEQ ID NO: 22225 - RNA, 20 nt, synthetic construct
  source 1..20: mol_type = other RNA
cgtggcagatgttattatct

SEQ ID NO: 22226 - RNA, 20 nt, synthetic construct
  source 1..20: mol_type = other RNA
ctaaactgtatgaagtgtct

SEQ ID NO: 22227 - RNA, 20 nt, synthetic construct
  source 1..20: mol_type = other RNA
ctaacttggtgtcaagctat

SEQ ID NO: 22228 - RNA, 20 nt, synthetic construct
  source 1..20: mol_type = other RNA
ctaagtggatcaacccaagg

SEQ ID NO: 22229 - RNA, 20 nt, synthetic construct
  source 1..20: mol_type = other RNA
ctacacccatctgattttct

SEQ ID NO: 22230 - RNA, 20 nt, synthetic construct
  source 1..20: mol_type = other RNA
ctacatgatttggccccaag

SEQ ID NO: 22231 - RNA, 20 nt, synthetic construct
  source 1..20: mol_type = other RNA
ctactagacacttcatacag

SEQ ID NO: 22232 - RNA, 20 nt, synthetic construct
  source 1..20: mol_type = other RNA
ctagaaatctgctagaaaaa

SEQ ID NO: 22233 - RNA, 20 nt, synthetic construct
  source 1..20: mol_type = other RNA
ctagacacttcatacagttt

SEQ ID NO: 22234 - RNA, 20 nt, synthetic construct
  source 1..20: mol_type = other RNA
ctagcagatttctagcagta

SEQ ID NO: 22235 - RNA, 20 nt, synthetic construct
  source 1..20: mol_type = other RNA
ctagcagtatcttctgtcac

SEQ ID NO: 22236 - RNA, 20 nt, synthetic construct
  source 1..20: mol_type = other RNA
ctagtagagtgcctgggaca

SEQ ID NO: 22237 - RNA, 20 nt, synthetic construct
  source 1..20: mol_type = other RNA
ctatacatgccttttttgtt

SEQ ID NO: 22238 - RNA, 20 nt, synthetic construct
  source 1..20: mol_type = other RNA
ctatacgtggcagatgttat

SEQ ID NO: 22239 - RNA, 20 nt, synthetic construct
  source 1..20: mol_type = other RNA
ctatatcaggcaccaagtgt

SEQ ID NO: 22240 - RNA, 20 nt, synthetic construct
  source 1..20: mol_type = other RNA
ctatgagtgctgagagggca

SEQ ID NO: 22241 - RNA, 20 nt, synthetic construct
  source 1..20: mol_type = other RNA
ctatgtcccaggcactctac

SEQ ID NO: 22242 - RNA, 20 nt, synthetic construct
  source 1..20: mol_type = other RNA
ctattatgaactgagaaatg

SEQ ID NO: 22243 - RNA, 20 nt, synthetic construct
  source 1..20: mol_type = other RNA
ctcaagagtctacatgattt

SEQ ID NO: 22244 - RNA, 20 nt, synthetic construct
  source 1..20: mol_type = other RNA
ctcaaggacttctgatgccc

SEQ ID NO: 22245 - RNA, 20 nt, synthetic construct
  source 1..20: mol_type = other RNA
ctcaccactgcacactgcac

SEQ ID NO: 22246 - RNA, 20 nt, synthetic construct
  source 1..20: mol_type = other RNA
ctcagataataacatctgcc

SEQ ID NO: 22247 - RNA, 20 nt, synthetic construct
  source 1..20: mol_type = other RNA
ctcagcactcatagcattcc

SEQ ID NO: 22248 - RNA, 20 nt, synthetic construct
  source 1..20: mol_type = other RNA
ctcagttcataatagccccc

SEQ ID NO: 22249 - RNA, 20 nt, synthetic construct
  source 1..20: mol_type = other RNA
ctcataattcctctatacat

SEQ ID NO: 22250 - RNA, 20 nt, synthetic construct
  source 1..20: mol_type = other RNA
ctcatagcattccttaacac

SEQ ID NO: 22251 - RNA, 20 nt, synthetic construct
  source 1..20: mol_type = other RNA
ctcatgttattgtactctgt

SEQ ID NO: 22252 - RNA, 20 nt, synthetic construct
  source 1..20: mol_type = other RNA
ctcatttggccagagtggaa

SEQ ID NO: 22253 - RNA, 20 nt, synthetic construct
  source 1..20: mol_type = other RNA
ctccagagaaaggctcttaa

SEQ ID NO: 22254 - RNA, 20 nt, synthetic construct
  source 1..20: mol_type = other RNA
ctccagcctgggcaatggaa

SEQ ID NO: 22255 - RNA, 20 nt, synthetic construct
  source 1..20: mol_type = other RNA
ctccagtgacagaagatact

SEQ ID NO: 22256 - RNA, 20 nt, synthetic construct
  source 1..20: mol_type = other RNA
ctccattttgaagaataaac

SEQ ID NO: 22257 - RNA, 20 nt, synthetic construct
  source 1..20: mol_type = other RNA
ctcccaacttcaagtgatca

SEQ ID NO: 22258 - RNA, 20 nt, synthetic construct
  source 1..20: mol_type = other RNA
ctcccaattccatttccact

SEQ ID NO: 22259 - RNA, 20 nt, synthetic construct
  source 1..20: mol_type = other RNA
ctcctgccttgatctacacc

SEQ ID NO: 22260 - RNA, 20 nt, synthetic construct
  source 1..20: mol_type = other RNA
ctcctgggttcaagtgattc

SEQ ID NO: 22261 - RNA, 20 nt, synthetic construct
  source 1..20: mol_type = other RNA
ctctactagacacttcatac

SEQ ID NO: 22262 - RNA, 20 nt, synthetic construct
  source 1..20: mol_type = other RNA
ctctatacatgccttttttg

SEQ ID NO: 22263 - RNA, 20 nt, synthetic construct
  source 1..20: mol_type = other RNA
ctctatacgtggcagatgtt

SEQ ID NO: 22264 - RNA, 20 nt, synthetic construct
  source 1..20: mol_type = other RNA
ctctcaaggacttctgatgc

SEQ ID NO: 22265 - RNA, 20 nt, synthetic construct
  source 1..20: mol_type = other RNA
ctctcagcactcatagcatt

SEQ ID NO: 22266 - RNA, 20 nt, synthetic construct
  source 1..20: mol_type = other RNA
ctctggaggctctcaaggac

SEQ ID NO: 22267 - RNA, 20 nt, synthetic construct
  source 1..20: mol_type = other RNA
ctctggccaaatgagcttcc

SEQ ID NO: 22268 - RNA, 20 nt, synthetic construct
  source 1..20: mol_type = other RNA
ctctgtttccaccccttcca

SEQ ID NO: 22269 - RNA, 20 nt, synthetic construct
  source 1..20: mol_type = other RNA
ctcttaaaaatgcagcgcaa

SEQ ID NO: 22270 - RNA, 20 nt, synthetic construct
  source 1..20: mol_type = other RNA
ctcttgagtgatgtgttaag

SEQ ID NO: 22271 - RNA, 20 nt, synthetic construct
  source 1..20: mol_type = other RNA
ctgagaaatgaactttgaaa

SEQ ID NO: 22272 - RNA, 20 nt, synthetic construct
  source 1..20: mol_type = other RNA
ctgagagggcatcagaagtc

SEQ ID NO: 22273 - RNA, 20 nt, synthetic construct
  source 1..20: mol_type = other RNA
ctgagatctcaccactgcac

SEQ ID NO: 22274 - RNA, 20 nt, synthetic construct
  source 1..20: mol_type = other RNA
ctgaggaatatcgggaaaag

SEQ ID NO: 22275 - RNA, 20 nt, synthetic construct
  source 1..20: mol_type = other RNA
ctgaggttcctaagtggatc

SEQ ID NO: 22276 - RNA, 20 nt, synthetic construct
  source 1..20: mol_type = other RNA
ctgatatagcttgacaccaa

SEQ ID NO: 22277 - RNA, 20 nt, synthetic construct
  source 1..20: mol_type = other RNA
ctgatcacttgaagttggga

SEQ ID NO: 22278 - RNA, 20 nt, synthetic construct
  source 1..20: mol_type = other RNA
ctgatgccctctcagcactc

SEQ ID NO: 22279 - RNA, 20 nt, synthetic construct
  source 1..20: mol_type = other RNA
ctgattttctaaactgtatg

SEQ ID NO: 22280 - RNA, 20 nt, synthetic construct
  source 1..20: mol_type = other RNA
ctgcacactgcactccagcc

SEQ ID NO: 22281 - RNA, 20 nt, synthetic construct
  source 1..20: mol_type = other RNA
ctgcatttttaagagccttt

SEQ ID NO: 22282 - RNA, 20 nt, synthetic construct
  source 1..20: mol_type = other RNA
ctgccacgtatagagcaatt

SEQ ID NO: 22283 - RNA, 20 nt, synthetic construct
  source 1..20: mol_type = other RNA
ctgccttgatctacacccat

SEQ ID NO: 22284 - RNA, 20 nt, synthetic construct
  source 1..20: mol_type = other RNA
ctgctagaaatctgctagaa

SEQ ID NO: 22285 - RNA, 20 nt, synthetic construct
  source 1..20: mol_type = other RNA
ctgctcctgccttgatctac

SEQ ID NO: 22286 - RNA, 20 nt, synthetic construct
  source 1..20: mol_type = other RNA
ctggagattgcgctgcattt

SEQ ID NO: 22287 - RNA, 20 nt, synthetic construct
  source 1..20: mol_type = other RNA
ctggaggctctcaaggactt

SEQ ID NO: 22288 - RNA, 20 nt, synthetic construct
  source 1..20: mol_type = other RNA
ctggagtgcagtgtgcagtg

SEQ ID NO: 22289 - RNA, 20 nt, synthetic construct
  source 1..20: mol_type = other RNA
ctggcaatattaatgtgtct

SEQ ID NO: 22290 - RNA, 20 nt, synthetic construct
  source 1..20: mol_type = other RNA
ctggccaaatgagcttccac

SEQ ID NO: 22291 - RNA, 20 nt, synthetic construct
  source 1..20: mol_type = other RNA
ctgggacatagcaattgctc

SEQ ID NO: 22292 - RNA, 20 nt, synthetic construct
  source 1..20: mol_type = other RNA
ctgggcaatggaatgagatt

SEQ ID NO: 22293 - RNA, 20 nt, synthetic construct
  source 1..20: mol_type = other RNA
ctgggttcaagtgattcctg

SEQ ID NO: 22294 - RNA, 20 nt, synthetic construct
  source 1..20: mol_type = other RNA
ctgtagtcccaggaatcact

SEQ ID NO: 22295 - RNA, 20 nt, synthetic construct
  source 1..20: mol_type = other RNA
ctgtatgaagtgtctagtag

SEQ ID NO: 22296 - RNA, 20 nt, synthetic construct
  source 1..20: mol_type = other RNA
ctgtcactggagattgcgct

SEQ ID NO: 22297 - RNA, 20 nt, synthetic construct
  source 1..20: mol_type = other RNA
ctgtttccaccccttccatt

SEQ ID NO: 22298 - RNA, 20 nt, synthetic construct
  source 1..20: mol_type = other RNA
cttaaaaatgcagcgcaatc

SEQ ID NO: 22299 - RNA, 20 nt, synthetic construct
  source 1..20: mol_type = other RNA
cttaacacatcactcaagag

SEQ ID NO: 22300 - RNA, 20 nt, synthetic construct
  source 1..20: mol_type = other RNA
cttaggaacctcagataata

SEQ ID NO: 22301 - RNA, 20 nt, synthetic construct
  source 1..20: mol_type = other RNA
cttatgtttatgcctttctt

SEQ ID NO: 22302 - RNA, 20 nt, synthetic construct
  source 1..20: mol_type = other RNA
cttcaaaatggaggtggctt

SEQ ID NO: 22303 - RNA, 20 nt, synthetic construct
  source 1..20: mol_type = other RNA
cttcaagtgatcagcctgcc

SEQ ID NO: 22304 - RNA, 20 nt, synthetic construct
  source 1..20: mol_type = other RNA
cttcatacagtttagaaaat

SEQ ID NO: 22305 - RNA, 20 nt, synthetic construct
  source 1..20: mol_type = other RNA
cttccaccttcccaacaagc

SEQ ID NO: 22306 - RNA, 20 nt, synthetic construct
  source 1..20: mol_type = other RNA
cttcccaacaagccacctcc

SEQ ID NO: 22307 - RNA, 20 nt, synthetic construct
  source 1..20: mol_type = other RNA
cttctgatgccctctcagca

SEQ ID NO: 22308 - RNA, 20 nt, synthetic construct
  source 1..20: mol_type = other RNA
cttctgtcactggagattgc

SEQ ID NO: 22309 - RNA, 20 nt, synthetic construct
  source 1..20: mol_type = other RNA
cttgaactcccaacttcaag

SEQ ID NO: 22310 - RNA, 20 nt, synthetic construct
  source 1..20: mol_type = other RNA
cttgacaccaagttagcccc

SEQ ID NO: 22311 - RNA, 20 nt, synthetic construct
  source 1..20: mol_type = other RNA
cttgagagcctccagagaaa

SEQ ID NO: 22312 - RNA, 20 nt, synthetic construct
  source 1..20: mol_type = other RNA
cttgagtgatgtgttaagga

SEQ ID NO: 22313 - RNA, 20 nt, synthetic construct
  source 1..20: mol_type = other RNA
cttgatctacacccatctga

SEQ ID NO: 22314 - RNA, 20 nt, synthetic construct
  source 1..20: mol_type = other RNA
cttggggccaaatcatgtag

SEQ ID NO: 22315 - RNA, 20 nt, synthetic construct
  source 1..20: mol_type = other RNA
cttggggctaacttggtgtc

SEQ ID NO: 22316 - RNA, 20 nt, synthetic construct
  source 1..20: mol_type = other RNA
cttgggttgatccacttagg

SEQ ID NO: 22317 - RNA, 20 nt, synthetic construct
  source 1..20: mol_type = other RNA
cttggtatctttccctcata

SEQ ID NO: 22318 - RNA, 20 nt, synthetic construct
  source 1..20: mol_type = other RNA
cttggtgcctgatatagctt

SEQ ID NO: 22319 - RNA, 20 nt, synthetic construct
  source 1..20: mol_type = other RNA
cttggtgtcaagctatatca

SEQ ID NO: 22320 - RNA, 20 nt, synthetic construct
  source 1..20: mol_type = other RNA
cttgttgggaaggtggaagc

SEQ ID NO: 22321 - RNA, 20 nt, synthetic construct
  source 1..20: mol_type = other RNA
ctttccctcataattcctct

SEQ ID NO: 22322 - RNA, 20 nt, synthetic construct
  source 1..20: mol_type = other RNA
ctttctctggaggctctcaa

SEQ ID NO: 22323 - RNA, 20 nt, synthetic construct
  source 1..20: mol_type = other RNA
ctttctttttggttcctgct

SEQ ID NO: 22324 - RNA, 20 nt, synthetic construct
  source 1..20: mol_type = other RNA
ctttgaaaagtatcttgggg

SEQ ID NO: 22325 - RNA, 20 nt, synthetic construct
  source 1..20: mol_type = other RNA
cttttcaaagttcatttctc

SEQ ID NO: 22326 - RNA, 20 nt, synthetic construct
  source 1..20: mol_type = other RNA
ctttttggttcctgctcctg

SEQ ID NO: 22327 - RNA, 20 nt, synthetic construct
  source 1..20: mol_type = other RNA
gaaaagacacattaatattg

SEQ ID NO: 22328 - RNA, 20 nt, synthetic construct
  source 1..20: mol_type = other RNA
gaaaagtatcttggggccaa

SEQ ID NO: 22329 - RNA, 20 nt, synthetic construct
  source 1..20: mol_type = other RNA
gaaaatcagatgggtgtaga

SEQ ID NO: 22330 - RNA, 20 nt, synthetic construct
  source 1..20: mol_type = other RNA
gaaacagagtacaataacat

SEQ ID NO: 22331 - RNA, 20 nt, synthetic construct
  source 1..20: mol_type = other RNA
gaaagataccaagtcacggt

SEQ ID NO: 22332 - RNA, 20 nt, synthetic construct
  source 1..20: mol_type = other RNA
gaaaggcataaacataagaa

SEQ ID NO: 22333 - RNA, 20 nt, synthetic construct
  source 1..20: mol_type = other RNA
gaaaggctcttaaaaatgca

SEQ ID NO: 22334 - RNA, 20 nt, synthetic construct
  source 1..20: mol_type = other RNA
gaaataccctggcaatatta

SEQ ID NO: 22335 - RNA, 20 nt, synthetic construct
  source 1..20: mol_type = other RNA
gaaatcgatgaccaaatgta

SEQ ID NO: 22336 - RNA, 20 nt, synthetic construct
  source 1..20: mol_type = other RNA
gaaatgaactttgaaaagta

SEQ ID NO: 22337 - RNA, 20 nt, synthetic construct
  source 1..20: mol_type = other RNA
gaaatggaattgggagaaat

SEQ ID NO: 22338 - RNA, 20 nt, synthetic construct
  source 1..20: mol_type = other RNA
gaacataccttgggttgatc

SEQ ID NO: 22339 - RNA, 20 nt, synthetic construct
  source 1..20: mol_type = other RNA
gaaccaaaaagaaaggcata

SEQ ID NO: 22340 - RNA, 20 nt, synthetic construct
  source 1..20: mol_type = other RNA
gaacctcagataataacatc

SEQ ID NO: 22341 - RNA, 20 nt, synthetic construct
  source 1..20: mol_type = other RNA
gaactcccaacttcaagtga

SEQ ID NO: 22342 - RNA, 20 nt, synthetic construct
  source 1..20: mol_type = other RNA
gaactgagaaatgaactttg

SEQ ID NO: 22343 - RNA, 20 nt, synthetic construct
  source 1..20: mol_type = other RNA
gaactttgaaaagtatcttg

SEQ ID NO: 22344 - RNA, 20 nt, synthetic construct
  source 1..20: mol_type = other RNA
gaagaataaaccgtgacttg

SEQ ID NO: 22345 - RNA, 20 nt, synthetic construct
  source 1..20: mol_type = other RNA
gaagatactgctagaaatct

SEQ ID NO: 22346 - RNA, 20 nt, synthetic construct
  source 1..20: mol_type = other RNA
gaagctcatttggccagagt

SEQ ID NO: 22347 - RNA, 20 nt, synthetic construct
  source 1..20: mol_type = other RNA
gaaggggtggaaacagagta

SEQ ID NO: 22348 - RNA, 20 nt, synthetic construct
  source 1..20: mol_type = other RNA
gaaggtggaagctcatttgg

SEQ ID NO: 22349 - RNA, 20 nt, synthetic construct
  source 1..20: mol_type = other RNA
gaagtccttgagagcctcca

SEQ ID NO: 22350 - RNA, 20 nt, synthetic construct
  source 1..20: mol_type = other RNA
gaagtgtctagtagagtgcc

SEQ ID NO: 22351 - RNA, 20 nt, synthetic construct
  source 1..20: mol_type = other RNA
gaataaaccgtgacttggta

SEQ ID NO: 22352 - RNA, 20 nt, synthetic construct
  source 1..20: mol_type = other RNA
gaatatcgggaaaagacaca

SEQ ID NO: 22353 - RNA, 20 nt, synthetic construct
  source 1..20: mol_type = other RNA
gaatctcattccattgccca

SEQ ID NO: 22354 - RNA, 20 nt, synthetic construct
  source 1..20: mol_type = other RNA
gaatgagattccatcccaaa

SEQ ID NO: 22355 - RNA, 20 nt, synthetic construct
  source 1..20: mol_type = other RNA
gaatgctatgagtgctgaga

SEQ ID NO: 22356 - RNA, 20 nt, synthetic construct
  source 1..20: mol_type = other RNA
gaattatgagggaaagatac

SEQ ID NO: 22357 - RNA, 20 nt, synthetic construct
  source 1..20: mol_type = other RNA
gaattgggagaaatcgatga

SEQ ID NO: 22358 - RNA, 20 nt, synthetic construct
  source 1..20: mol_type = other RNA
gacacattaatattgccagg

SEQ ID NO: 22359 - RNA, 20 nt, synthetic construct
  source 1..20: mol_type = other RNA
gacaccaagttagccccaag

SEQ ID NO: 22360 - RNA, 20 nt, synthetic construct
  source 1..20: mol_type = other RNA
gacacttcatacagtttaga

SEQ ID NO: 22361 - RNA, 20 nt, synthetic construct
  source 1..20: mol_type = other RNA
gacagaagatactgctagaa

SEQ ID NO: 22362 - RNA, 20 nt, synthetic construct
  source 1..20: mol_type = other RNA
gacatagcaattgctctata

SEQ ID NO: 22363 - RNA, 20 nt, synthetic construct
  source 1..20: mol_type = other RNA
gaccaaatgtaaacacttgg

SEQ ID NO: 22364 - RNA, 20 nt, synthetic construct
  source 1..20: mol_type = other RNA
gactcttgagtgatgtgtta

SEQ ID NO: 22365 - RNA, 20 nt, synthetic construct
  source 1..20: mol_type = other RNA
gacttctgatgccctctcag

SEQ ID NO: 22366 - RNA, 20 nt, synthetic construct
  source 1..20: mol_type = other RNA
gacttggtatctttccctca

SEQ ID NO: 22367 - RNA, 20 nt, synthetic construct
  source 1..20: mol_type = other RNA
gagaaaggctcttaaaaatg

SEQ ID NO: 22368 - RNA, 20 nt, synthetic construct
  source 1..20: mol_type = other RNA
gagaaatcgatgaccaaatg

SEQ ID NO: 22369 - RNA, 20 nt, synthetic construct
  source 1..20: mol_type = other RNA
gagaaatgaactttgaaaag

SEQ ID NO: 22370 - RNA, 20 nt, synthetic construct
  source 1..20: mol_type = other RNA
gagagcctccagagaaaggc

SEQ ID NO: 22371 - RNA, 20 nt, synthetic construct
  source 1..20: mol_type = other RNA
gagagggcatcagaagtcct

SEQ ID NO: 22372 - RNA, 20 nt, synthetic construct
  source 1..20: mol_type = other RNA
gagatctcaccactgcacac

SEQ ID NO: 22373 - RNA, 20 nt, synthetic construct
  source 1..20: mol_type = other RNA
gagattccatcccaaaaaat

SEQ ID NO: 22374 - RNA, 20 nt, synthetic construct
  source 1..20: mol_type = other RNA
gagattgcgctgcattttta

SEQ ID NO: 22375 - RNA, 20 nt, synthetic construct
  source 1..20: mol_type = other RNA
gagcaattgctatgtcccag

SEQ ID NO: 22376 - RNA, 20 nt, synthetic construct
  source 1..20: mol_type = other RNA
gagcaggaaccaaaaagaaa

SEQ ID NO: 22377 - RNA, 20 nt, synthetic construct
  source 1..20: mol_type = other RNA
gagcctccagagaaaggctc

SEQ ID NO: 22378 - RNA, 20 nt, synthetic construct
  source 1..20: mol_type = other RNA
gagcctttctctggaggctc

SEQ ID NO: 22379 - RNA, 20 nt, synthetic construct
  source 1..20: mol_type = other RNA
gagctgagatctcaccactg

SEQ ID NO: 22380 - RNA, 20 nt, synthetic construct
  source 1..20: mol_type = other RNA
gagcttccaccttcccaaca

SEQ ID NO: 22381 - RNA, 20 nt, synthetic construct
  source 1..20: mol_type = other RNA
gaggaatatcgggaaaagac

SEQ ID NO: 22382 - RNA, 20 nt, synthetic construct
  source 1..20: mol_type = other RNA
gaggaattatgagggaaaga

SEQ ID NO: 22383 - RNA, 20 nt, synthetic construct
  source 1..20: mol_type = other RNA
gaggccaaggcaggctgatc

SEQ ID NO: 22384 - RNA, 20 nt, synthetic construct
  source 1..20: mol_type = other RNA
gaggctctcaaggacttctg

SEQ ID NO: 22385 - RNA, 20 nt, synthetic construct
  source 1..20: mol_type = other RNA
gagggaaagataccaagtca

SEQ ID NO: 22386 - RNA, 20 nt, synthetic construct
  source 1..20: mol_type = other RNA
gagggcatcagaagtccttg

SEQ ID NO: 22387 - RNA, 20 nt, synthetic construct
  source 1..20: mol_type = other RNA
gaggtggcttgttgggaagg

SEQ ID NO: 22388 - RNA, 20 nt, synthetic construct
  source 1..20: mol_type = other RNA
gaggttcctaagtggatcaa

SEQ ID NO: 22389 - RNA, 20 nt, synthetic construct
  source 1..20: mol_type = other RNA
gagtaatttgatgggggcta

SEQ ID NO: 22390 - RNA, 20 nt, synthetic construct
  source 1..20: mol_type = other RNA
gagtacaataacatgagtaa

SEQ ID NO: 22391 - RNA, 20 nt, synthetic construct
  source 1..20: mol_type = other RNA
gagtctacatgatttggccc

SEQ ID NO: 22392 - RNA, 20 nt, synthetic construct
  source 1..20: mol_type = other RNA
gagtgatgtgttaaggaatg

SEQ ID NO: 22393 - RNA, 20 nt, synthetic construct
  source 1..20: mol_type = other RNA
gagtgcagtgtgcagtggtg

SEQ ID NO: 22394 - RNA, 20 nt, synthetic construct
  source 1..20: mol_type = other RNA
gagtgcctgggacatagcaa

SEQ ID NO: 22395 - RNA, 20 nt, synthetic construct
  source 1..20: mol_type = other RNA
gagtgctgagagggcatcag

SEQ ID NO: 22396 - RNA, 20 nt, synthetic construct
  source 1..20: mol_type = other RNA
gagtggaaatggaattggga

SEQ ID NO: 22397 - RNA, 20 nt, synthetic construct
  source 1..20: mol_type = other RNA
gataataacatctgccacgt

SEQ ID NO: 22398 - RNA, 20 nt, synthetic construct
  source 1..20: mol_type = other RNA
gataccaagtcacggtttat

SEQ ID NO: 22399 - RNA, 20 nt, synthetic construct
  source 1..20: mol_type = other RNA
gatactgctagaaatctgct

SEQ ID NO: 22400 - RNA, 20 nt, synthetic construct
  source 1..20: mol_type = other RNA
gatacttttcaaagttcatt

SEQ ID NO: 22401 - RNA, 20 nt, synthetic construct
  source 1..20: mol_type = other RNA
gatatagcttgacaccaagt

SEQ ID NO: 22402 - RNA, 20 nt, synthetic construct
  source 1..20: mol_type = other RNA
gatcaacccaaggtatgttc

SEQ ID NO: 22403 - RNA, 20 nt, synthetic construct
  source 1..20: mol_type = other RNA
gatcaaggcaggagcaggaa

SEQ ID NO: 22404 - RNA, 20 nt, synthetic construct
  source 1..20: mol_type = other RNA
gatccacttaggaacctcag

SEQ ID NO: 22405 - RNA, 20 nt, synthetic construct
  source 1..20: mol_type = other RNA
gatctacacccatctgattt

SEQ ID NO: 22406 - RNA, 20 nt, synthetic construct
  source 1..20: mol_type = other RNA
gatctcaccactgcacactg

SEQ ID NO: 22407 - RNA, 20 nt, synthetic construct
  source 1..20: mol_type = other RNA
gatgaccaaatgtaaacact

SEQ ID NO: 22408 - RNA, 20 nt, synthetic construct
  source 1..20: mol_type = other RNA
gatgccctctcagcactcat

SEQ ID NO: 22409 - RNA, 20 nt, synthetic construct
  source 1..20: mol_type = other RNA
gatggaatctcattccattg

SEQ ID NO: 22410 - RNA, 20 nt, synthetic construct
  source 1..20: mol_type = other RNA
gatgggggctattatgaact

SEQ ID NO: 22411 - RNA, 20 nt, synthetic construct
  source 1..20: mol_type = other RNA
gatgggtgtagatcaaggca

SEQ ID NO: 22412 - RNA, 20 nt, synthetic construct
  source 1..20: mol_type = other RNA
gatgtgttaaggaatgctat

SEQ ID NO: 22413 - RNA, 20 nt, synthetic construct
  source 1..20: mol_type = other RNA
gatgttattatctgaggttc

SEQ ID NO: 22414 - RNA, 20 nt, synthetic construct
  source 1..20: mol_type = other RNA
gattccatcccaaaaaataa

SEQ ID NO: 22415 - RNA, 20 nt, synthetic construct
  source 1..20: mol_type = other RNA
gattcctgggactacaggca

SEQ ID NO: 22416 - RNA, 20 nt, synthetic construct
  source 1..20: mol_type = other RNA
gattgcgctgcatttttaag

SEQ ID NO: 22417 - RNA, 20 nt, synthetic construct
  source 1..20: mol_type = other RNA
gatttctagcagtatcttct

SEQ ID NO: 22418 - RNA, 20 nt, synthetic construct
  source 1..20: mol_type = other RNA
gatttctcccaattccattt

SEQ ID NO: 22419 - RNA, 20 nt, synthetic construct
  source 1..20: mol_type = other RNA
gatttggccccaagatactt

SEQ ID NO: 22420 - RNA, 20 nt, synthetic construct
  source 1..20: mol_type = other RNA
gattttctaaactgtatgaa

SEQ ID NO: 22421 - RNA, 20 nt, synthetic construct
  source 1..20: mol_type = other RNA
gcaatattaatgtgtctttt

SEQ ID NO: 22422 - RNA, 20 nt, synthetic construct
  source 1..20: mol_type = other RNA
gcaatctccagtgacagaag

SEQ ID NO: 22423 - RNA, 20 nt, synthetic construct
  source 1..20: mol_type = other RNA
gcaatggaatgagattccat

SEQ ID NO: 22424 - RNA, 20 nt, synthetic construct
  source 1..20: mol_type = other RNA
gcaattgctatgtcccaggc

SEQ ID NO: 22425 - RNA, 20 nt, synthetic construct
  source 1..20: mol_type = other RNA
gcaattgctctatacgtggc

SEQ ID NO: 22426 - RNA, 20 nt, synthetic construct
  source 1..20: mol_type = other RNA
gcacactgcactccagcctg

SEQ ID NO: 22427 - RNA, 20 nt, synthetic construct
  source 1..20: mol_type = other RNA
gcaccaagtgtttacatttg

SEQ ID NO: 22428 - RNA, 20 nt, synthetic construct
  source 1..20: mol_type = other RNA
gcactcatagcattccttaa

SEQ ID NO: 22429 - RNA, 20 nt, synthetic construct
  source 1..20: mol_type = other RNA
gcactctactagacacttca

SEQ ID NO: 22430 - RNA, 20 nt, synthetic construct
  source 1..20: mol_type = other RNA
gcagatgttattatctgagg

SEQ ID NO: 22431 - RNA, 20 nt, synthetic construct
  source 1..20: mol_type = other RNA
gcagatttctagcagtatct

SEQ ID NO: 22432 - RNA, 20 nt, synthetic construct
  source 1..20: mol_type = other RNA
gcagcgcaatctccagtgac

SEQ ID NO: 22433 - RNA, 20 nt, synthetic construct
  source 1..20: mol_type = other RNA
gcaggaaccaaaaagaaagg

SEQ ID NO: 22434 - RNA, 20 nt, synthetic construct
  source 1..20: mol_type = other RNA
gcaggagcaggaaccaaaaa

SEQ ID NO: 22435 - RNA, 20 nt, synthetic construct
  source 1..20: mol_type = other RNA
gcaggctgatcacttgaagt

SEQ ID NO: 22436 - RNA, 20 nt, synthetic construct
  source 1..20: mol_type = other RNA
gcagtatcttctgtcactgg

SEQ ID NO: 22437 - RNA, 20 nt, synthetic construct
  source 1..20: mol_type = other RNA
gcagtgtgcagtggtgagat

SEQ ID NO: 22438 - RNA, 20 nt, synthetic construct
  source 1..20: mol_type = other RNA
gcatcagaagtccttgagag

SEQ ID NO: 22439 - RNA, 20 nt, synthetic construct
  source 1..20: mol_type = other RNA
gcatgtatagaggaattatg

SEQ ID NO: 22440 - RNA, 20 nt, synthetic construct
  source 1..20: mol_type = other RNA
gcattccttaacacatcact

SEQ ID NO: 22441 - RNA, 20 nt, synthetic construct
  source 1..20: mol_type = other RNA
gcatttttaagagcctttct

SEQ ID NO: 22442 - RNA, 20 nt, synthetic construct
  source 1..20: mol_type = other RNA
gccaaatcatgtagactctt

SEQ ID NO: 22443 - RNA, 20 nt, synthetic construct
  source 1..20: mol_type = other RNA
gccaaatgagcttccacctt

SEQ ID NO: 22444 - RNA, 20 nt, synthetic construct
  source 1..20: mol_type = other RNA
gccaaggcaggctgatcact

SEQ ID NO: 22445 - RNA, 20 nt, synthetic construct
  source 1..20: mol_type = other RNA
gccacctccattttgaagaa

SEQ ID NO: 22446 - RNA, 20 nt, synthetic construct
  source 1..20: mol_type = other RNA
gccacgtatagagcaattgc

SEQ ID NO: 22447 - RNA, 20 nt, synthetic construct
  source 1..20: mol_type = other RNA
gccagagtggaaatggaatt

SEQ ID NO: 22448 - RNA, 20 nt, synthetic construct
  source 1..20: mol_type = other RNA
gccagggtatttcacttggg

SEQ ID NO: 22449 - RNA, 20 nt, synthetic construct
  source 1..20: mol_type = other RNA
gccccaagatacttttcaaa

SEQ ID NO: 22450 - RNA, 20 nt, synthetic construct
  source 1..20: mol_type = other RNA
gccccaagtgaaataccctg

SEQ ID NO: 22451 - RNA, 20 nt, synthetic construct
  source 1..20: mol_type = other RNA
gcccccatcaaattactcat

SEQ ID NO: 22452 - RNA, 20 nt, synthetic construct
  source 1..20: mol_type = other RNA
gccctctcagcactcatagc

SEQ ID NO: 22453 - RNA, 20 nt, synthetic construct
  source 1..20: mol_type = other RNA
gcctccagagaaaggctctt

SEQ ID NO: 22454 - RNA, 20 nt, synthetic construct
  source 1..20: mol_type = other RNA
gcctcctgggttcaagtgat

SEQ ID NO: 22455 - RNA, 20 nt, synthetic construct
  source 1..20: mol_type = other RNA
gcctgatatagcttgacacc

SEQ ID NO: 22456 - RNA, 20 nt, synthetic construct
  source 1..20: mol_type = other RNA
gcctgggacatagcaattgc

SEQ ID NO: 22457 - RNA, 20 nt, synthetic construct
  source 1..20: mol_type = other RNA
gcctgggcaatggaatgaga

SEQ ID NO: 22458 - RNA, 20 nt, synthetic construct
  source 1..20: mol_type = other RNA
gcctgtagtcccaggaatca

SEQ ID NO: 22459 - RNA, 20 nt, synthetic construct
  source 1..20: mol_type = other RNA
gccttgatctacacccatct

SEQ ID NO: 22460 - RNA, 20 nt, synthetic construct
  source 1..20: mol_type = other RNA
gcctttctctggaggctctc

SEQ ID NO: 22461 - RNA, 20 nt, synthetic construct
  source 1..20: mol_type = other RNA
gcctttctttttggttcctg

SEQ ID NO: 22462 - RNA, 20 nt, synthetic construct
  source 1..20: mol_type = other RNA
gcgcaatctccagtgacaga

SEQ ID NO: 22463 - RNA, 20 nt, synthetic construct
  source 1..20: mol_type = other RNA
gcgctgcatttttaagagcc

SEQ ID NO: 22464 - RNA, 20 nt, synthetic construct
  source 1..20: mol_type = other RNA
gctaacttggtgtcaagcta

SEQ ID NO: 22465 - RNA, 20 nt, synthetic construct
  source 1..20: mol_type = other RNA
gctagaaatctgctagaaaa

SEQ ID NO: 22466 - RNA, 20 nt, synthetic construct
  source 1..20: mol_type = other RNA
gctatatcaggcaccaagtg

SEQ ID NO: 22467 - RNA, 20 nt, synthetic construct
  source 1..20: mol_type = other RNA
gctatgagtgctgagagggc

SEQ ID NO: 22468 - RNA, 20 nt, synthetic construct
  source 1..20: mol_type = other RNA
gctatgtcccaggcactcta

SEQ ID NO: 22469 - RNA, 20 nt, synthetic construct
  source 1..20: mol_type = other RNA
gctattatgaactgagaaat

SEQ ID NO: 22470 - RNA, 20 nt, synthetic construct
  source 1..20: mol_type = other RNA
gctcatttggccagagtgga

SEQ ID NO: 22471 - RNA, 20 nt, synthetic construct
  source 1..20: mol_type = other RNA
gctcctgccttgatctacac

SEQ ID NO: 22472 - RNA, 20 nt, synthetic construct
  source 1..20: mol_type = other RNA
gctctatacgtggcagatgt

SEQ ID NO: 22473 - RNA, 20 nt, synthetic construct
  source 1..20: mol_type = other RNA
gctctcaaggacttctgatg

SEQ ID NO: 22474 - RNA, 20 nt, synthetic construct
  source 1..20: mol_type = other RNA
gctcttaaaaatgcagcgca

SEQ ID NO: 22475 - RNA, 20 nt, synthetic construct
  source 1..20: mol_type = other RNA
gctgagagggcatcagaagt

SEQ ID NO: 22476 - RNA, 20 nt, synthetic construct
  source 1..20: mol_type = other RNA
gctgagatctcaccactgca

SEQ ID NO: 22477 - RNA, 20 nt, synthetic construct
  source 1..20: mol_type = other RNA
gctgatcacttgaagttggg

SEQ ID NO: 22478 - RNA, 20 nt, synthetic construct
  source 1..20: mol_type = other RNA
gctgcatttttaagagcctt

SEQ ID NO: 22479 - RNA, 20 nt, synthetic construct
  source 1..20: mol_type = other RNA
gctggagtgcagtgtgcagt

SEQ ID NO: 22480 - RNA, 20 nt, synthetic construct
  source 1..20: mol_type = other RNA
gcttccaccttcccaacaag

SEQ ID NO: 22481 - RNA, 20 nt, synthetic construct
  source 1..20: mol_type = other RNA
gcttgacaccaagttagccc

SEQ ID NO: 22482 - RNA, 20 nt, synthetic construct
  source 1..20: mol_type = other RNA
gcttgttgggaaggtggaag

SEQ ID NO: 22483 - RNA, 20 nt, synthetic construct
  source 1..20: mol_type = other RNA
ggaaaagacacattaatatt

SEQ ID NO: 22484 - RNA, 20 nt, synthetic construct
  source 1..20: mol_type = other RNA
ggaaacagagtacaataaca

SEQ ID NO: 22485 - RNA, 20 nt, synthetic construct
  source 1..20: mol_type = other RNA
ggaaagataccaagtcacgg

SEQ ID NO: 22486 - RNA, 20 nt, synthetic construct
  source 1..20: mol_type = other RNA
ggaaatggaattgggagaaa

SEQ ID NO: 22487 - RNA, 20 nt, synthetic construct
  source 1..20: mol_type = other RNA
ggaaccaaaaagaaaggcat

SEQ ID NO: 22488 - RNA, 20 nt, synthetic construct
  source 1..20: mol_type = other RNA
ggaacctcagataataacat

SEQ ID NO: 22489 - RNA, 20 nt, synthetic construct
  source 1..20: mol_type = other RNA
ggaagctcatttggccagag

SEQ ID NO: 22490 - RNA, 20 nt, synthetic construct
  source 1..20: mol_type = other RNA
ggaaggggtggaaacagagt

SEQ ID NO: 22491 - RNA, 20 nt, synthetic construct
  source 1..20: mol_type = other RNA
ggaaggtggaagctcatttg

SEQ ID NO: 22492 - RNA, 20 nt, synthetic construct
  source 1..20: mol_type = other RNA
ggaatatcgggaaaagacac

SEQ ID NO: 22493 - RNA, 20 nt, synthetic construct
  source 1..20: mol_type = other RNA
ggaatctcattccattgccc

SEQ ID NO: 22494 - RNA, 20 nt, synthetic construct
  source 1..20: mol_type = other RNA
ggaatgagattccatcccaa

SEQ ID NO: 22495 - RNA, 20 nt, synthetic construct
  source 1..20: mol_type = other RNA
ggaatgctatgagtgctgag

SEQ ID NO: 22496 - RNA, 20 nt, synthetic construct
  source 1..20: mol_type = other RNA
ggaattatgagggaaagata

SEQ ID NO: 22497 - RNA, 20 nt, synthetic construct
  source 1..20: mol_type = other RNA
ggaattgggagaaatcgatg

SEQ ID NO: 22498 - RNA, 20 nt, synthetic construct
  source 1..20: mol_type = other RNA
ggacatagcaattgctctat

SEQ ID NO: 22499 - RNA, 20 nt, synthetic construct
  source 1..20: mol_type = other RNA
ggacttctgatgccctctca

SEQ ID NO: 22500 - RNA, 20 nt, synthetic construct
  source 1..20: mol_type = other RNA
ggagaaatcgatgaccaaat

SEQ ID NO: 22501 - RNA, 20 nt, synthetic construct
  source 1..20: mol_type = other RNA
ggagattgcgctgcattttt

SEQ ID NO: 22502 - RNA, 20 nt, synthetic construct
  source 1..20: mol_type = other RNA
ggagcaggaaccaaaaagaa

SEQ ID NO: 22503 - RNA, 20 nt, synthetic construct
  source 1..20: mol_type = other RNA
ggaggctctcaaggacttct

SEQ ID NO: 22504 - RNA, 20 nt, synthetic construct
  source 1..20: mol_type = other RNA
ggaggtggcttgttgggaag

SEQ ID NO: 22505 - RNA, 20 nt, synthetic construct
  source 1..20: mol_type = other RNA
ggagtgcagtgtgcagtggt

SEQ ID NO: 22506 - RNA, 20 nt, synthetic construct
  source 1..20: mol_type = other RNA
ggatcaacccaaggtatgtt

SEQ ID NO: 22507 - RNA, 20 nt, synthetic construct
  source 1..20: mol_type = other RNA
ggatggaatctcattccatt

SEQ ID NO: 22508 - RNA, 20 nt, synthetic construct
  source 1..20: mol_type = other RNA
ggcaatattaatgtgtcttt

SEQ ID NO: 22509 - RNA, 20 nt, synthetic construct
  source 1..20: mol_type = other RNA
ggcaatggaatgagattcca

SEQ ID NO: 22510 - RNA, 20 nt, synthetic construct
  source 1..20: mol_type = other RNA
ggcaccaagtgtttacattt

SEQ ID NO: 22511 - RNA, 20 nt, synthetic construct
  source 1..20: mol_type = other RNA
ggcactctactagacacttc

SEQ ID NO: 22512 - RNA, 20 nt, synthetic construct
  source 1..20: mol_type = other RNA
ggcagatgttattatctgag

SEQ ID NO: 22513 - RNA, 20 nt, synthetic construct
  source 1..20: mol_type = other RNA
ggcaggagcaggaaccaaaa

SEQ ID NO: 22514 - RNA, 20 nt, synthetic construct
  source 1..20: mol_type = other RNA
ggcaggctgatcacttgaag

SEQ ID NO: 22515 - RNA, 20 nt, synthetic construct
  source 1..20: mol_type = other RNA
ggcataaacataagaaaaaa

SEQ ID NO: 22516 - RNA, 20 nt, synthetic construct
  source 1..20: mol_type = other RNA
ggcatcagaagtccttgaga

SEQ ID NO: 22517 - RNA, 20 nt, synthetic construct
  source 1..20: mol_type = other RNA
ggcatgtatagaggaattat

SEQ ID NO: 22518 - RNA, 20 nt, synthetic construct
  source 1..20: mol_type = other RNA
ggccaaatcatgtagactct

SEQ ID NO: 22519 - RNA, 20 nt, synthetic construct
  source 1..20: mol_type = other RNA
ggccaaatgagcttccacct

SEQ ID NO: 22520 - RNA, 20 nt, synthetic construct
  source 1..20: mol_type = other RNA
ggccaaggcaggctgatcac

SEQ ID NO: 22521 - RNA, 20 nt, synthetic construct
  source 1..20: mol_type = other RNA
ggccagagtggaaatggaat

SEQ ID NO: 22522 - RNA, 20 nt, synthetic construct
  source 1..20: mol_type = other RNA
ggccccaagatacttttcaa

SEQ ID NO: 22523 - RNA, 20 nt, synthetic construct
  source 1..20: mol_type = other RNA
ggctaacttggtgtcaagct

SEQ ID NO: 22524 - RNA, 20 nt, synthetic construct
  source 1..20: mol_type = other RNA
ggctattatgaactgagaaa

SEQ ID NO: 22525 - RNA, 20 nt, synthetic construct
  source 1..20: mol_type = other RNA
ggctctcaaggacttctgat

SEQ ID NO: 22526 - RNA, 20 nt, synthetic construct
  source 1..20: mol_type = other RNA
ggctcttaaaaatgcagcgc

SEQ ID NO: 22527 - RNA, 20 nt, synthetic construct
  source 1..20: mol_type = other RNA
ggctgatcacttgaagttgg

SEQ ID NO: 22528 - RNA, 20 nt, synthetic construct
  source 1..20: mol_type = other RNA
ggctggagtgcagtgtgcag

SEQ ID NO: 22529 - RNA, 20 nt, synthetic construct
  source 1..20: mol_type = other RNA
ggcttgttgggaaggtggaa

SEQ ID NO: 22530 - RNA, 20 nt, synthetic construct
  source 1..20: mol_type = other RNA
gggaaaagacacattaatat

SEQ ID NO: 22531 - RNA, 20 nt, synthetic construct
  source 1..20: mol_type = other RNA
gggaaagataccaagtcacg

SEQ ID NO: 22532 - RNA, 20 nt, synthetic construct
  source 1..20: mol_type = other RNA
gggaaggtggaagctcattt

SEQ ID NO: 22533 - RNA, 20 nt, synthetic construct
  source 1..20: mol_type = other RNA
gggacatagcaattgctcta

SEQ ID NO: 22534 - RNA, 20 nt, synthetic construct
  source 1..20: mol_type = other RNA
gggagaaatcgatgaccaaa

SEQ ID NO: 22535 - RNA, 20 nt, synthetic construct
  source 1..20: mol_type = other RNA
gggatggaatctcattccat

SEQ ID NO: 22536 - RNA, 20 nt, synthetic construct
  source 1..20: mol_type = other RNA
gggcaatggaatgagattcc

SEQ ID NO: 22537 - RNA, 20 nt, synthetic construct
  source 1..20: mol_type = other RNA
gggcatcagaagtccttgag

SEQ ID NO: 22538 - RNA, 20 nt, synthetic construct
  source 1..20: mol_type = other RNA
gggccaaatcatgtagactc

SEQ ID NO: 22539 - RNA, 20 nt, synthetic construct
  source 1..20: mol_type = other RNA
gggctaacttggtgtcaagc

SEQ ID NO: 22540 - RNA, 20 nt, synthetic construct
  source 1..20: mol_type = other RNA
gggctattatgaactgagaa

SEQ ID NO: 22541 - RNA, 20 nt, synthetic construct
  source 1..20: mol_type = other RNA
ggggccaaatcatgtagact

SEQ ID NO: 22542 - RNA, 20 nt, synthetic construct
  source 1..20: mol_type = other RNA
ggggctaacttggtgtcaag

SEQ ID NO: 22543 - RNA, 20 nt, synthetic construct
  source 1..20: mol_type = other RNA
ggggctattatgaactgaga

SEQ ID NO: 22544 - RNA, 20 nt, synthetic construct
  source 1..20: mol_type = other RNA
gggggctattatgaactgag

SEQ ID NO: 22545 - RNA, 20 nt, synthetic construct
  source 1..20: mol_type = other RNA
ggggtggaaacagagtacaa

SEQ ID NO: 22546 - RNA, 20 nt, synthetic construct
  source 1..20: mol_type = other RNA
gggtatttcacttggggcta

SEQ ID NO: 22547 - RNA, 20 nt, synthetic construct
  source 1..20: mol_type = other RNA
gggtggaaacagagtacaat

SEQ ID NO: 22548 - RNA, 20 nt, synthetic construct
  source 1..20: mol_type = other RNA
gggtgtagatcaaggcagga

SEQ ID NO: 22549 - RNA, 20 nt, synthetic construct
  source 1..20: mol_type = other RNA
gggttcaagtgattcctggg

SEQ ID NO: 22550 - RNA, 20 nt, synthetic construct
  source 1..20: mol_type = other RNA
gggttgatccacttaggaac

SEQ ID NO: 22551 - RNA, 20 nt, synthetic construct
  source 1..20: mol_type = other RNA
ggtatctttccctcataatt

SEQ ID NO: 22552 - RNA, 20 nt, synthetic construct
  source 1..20: mol_type = other RNA
ggtatttcacttggggctaa

SEQ ID NO: 22553 - RNA, 20 nt, synthetic construct
  source 1..20: mol_type = other RNA
ggtcatcgatttctcccaat

SEQ ID NO: 22554 - RNA, 20 nt, synthetic construct
  source 1..20: mol_type = other RNA
ggtgcctgatatagcttgac

SEQ ID NO: 22555 - RNA, 20 nt, synthetic construct
  source 1..20: mol_type = other RNA
ggtggaaacagagtacaata

SEQ ID NO: 22556 - RNA, 20 nt, synthetic construct
  source 1..20: mol_type = other RNA
ggtggaagctcatttggcca

SEQ ID NO: 22557 - RNA, 20 nt, synthetic construct
  source 1..20: mol_type = other RNA
ggtggcttgttgggaaggtg

SEQ ID NO: 22558 - RNA, 20 nt, synthetic construct
  source 1..20: mol_type = other RNA
ggtggtgtgtgcctgtagtc

SEQ ID NO: 22559 - RNA, 20 nt, synthetic construct
  source 1..20: mol_type = other RNA
ggtgtagatcaaggcaggag

SEQ ID NO: 22560 - RNA, 20 nt, synthetic construct
  source 1..20: mol_type = other RNA
ggtgtcaagctatatcaggc

SEQ ID NO: 22561 - RNA, 20 nt, synthetic construct
  source 1..20: mol_type = other RNA
ggtgtgtgcctgtagtccca

SEQ ID NO: 22562 - RNA, 20 nt, synthetic construct
  source 1..20: mol_type = other RNA
ggttcaagtgattcctggga

SEQ ID NO: 22563 - RNA, 20 nt, synthetic construct
  source 1..20: mol_type = other RNA
ggttcctaagtggatcaacc

SEQ ID NO: 22564 - RNA, 20 nt, synthetic construct
  source 1..20: mol_type = other RNA
ggttcctgctcctgccttga

SEQ ID NO: 22565 - RNA, 20 nt, synthetic construct
  source 1..20: mol_type = other RNA
ggttgatccacttaggaacc

SEQ ID NO: 22566 - RNA, 20 nt, synthetic construct
  source 1..20: mol_type = other RNA
ggtttattcttcaaaatgga

SEQ ID NO: 22567 - RNA, 20 nt, synthetic construct
  source 1..20: mol_type = other RNA
gtaaacacttggtgcctgat

SEQ ID NO: 22568 - RNA, 20 nt, synthetic construct
  source 1..20: mol_type = other RNA
gtaatttgatgggggctatt

SEQ ID NO: 22569 - RNA, 20 nt, synthetic construct
  source 1..20: mol_type = other RNA
gtacaataacatgagtaatt

SEQ ID NO: 22570 - RNA, 20 nt, synthetic construct
  source 1..20: mol_type = other RNA
gtactctgtttccacccctt

SEQ ID NO: 22571 - RNA, 20 nt, synthetic construct
  source 1..20: mol_type = other RNA
gtagactcttgagtgatgtg

SEQ ID NO: 22572 - RNA, 20 nt, synthetic construct
  source 1..20: mol_type = other RNA
gtagagtgcctgggacatag

SEQ ID NO: 22573 - RNA, 20 nt, synthetic construct
  source 1..20: mol_type = other RNA
gtagatcaaggcaggagcag

SEQ ID NO: 22574 - RNA, 20 nt, synthetic construct
  source 1..20: mol_type = other RNA
gtagtcccaggaatcacttg

SEQ ID NO: 22575 - RNA, 20 nt, synthetic construct
  source 1..20: mol_type = other RNA
gtatagagcaattgctatgt

SEQ ID NO: 22576 - RNA, 20 nt, synthetic construct
  source 1..20: mol_type = other RNA
gtatagaggaattatgaggg

SEQ ID NO: 22577 - RNA, 20 nt, synthetic construct
  source 1..20: mol_type = other RNA
gtatcttctgtcactggaga

SEQ ID NO: 22578 - RNA, 20 nt, synthetic construct
  source 1..20: mol_type = other RNA
gtatcttggggccaaatcat

SEQ ID NO: 22579 - RNA, 20 nt, synthetic construct
  source 1..20: mol_type = other RNA
gtatctttccctcataattc

SEQ ID NO: 22580 - RNA, 20 nt, synthetic construct
  source 1..20: mol_type = other RNA
gtatgaagtgtctagtagag

SEQ ID NO: 22581 - RNA, 20 nt, synthetic construct
  source 1..20: mol_type = other RNA
gtatttcacttggggctaac

SEQ ID NO: 22582 - RNA, 20 nt, synthetic construct
  source 1..20: mol_type = other RNA
gtcaagctatatcaggcacc

SEQ ID NO: 22583 - RNA, 20 nt, synthetic construct
  source 1..20: mol_type = other RNA
gtcacggtttattcttcaaa

SEQ ID NO: 22584 - RNA, 20 nt, synthetic construct
  source 1..20: mol_type = other RNA
gtcactggagattgcgctgc

SEQ ID NO: 22585 - RNA, 20 nt, synthetic construct
  source 1..20: mol_type = other RNA
gtcatcgatttctcccaatt

SEQ ID NO: 22586 - RNA, 20 nt, synthetic construct
  source 1..20: mol_type = other RNA
gtcccaggaatcacttgaac

SEQ ID NO: 22587 - RNA, 20 nt, synthetic construct
  source 1..20: mol_type = other RNA
gtcccaggcactctactaga

SEQ ID NO: 22588 - RNA, 20 nt, synthetic construct
  source 1..20: mol_type = other RNA
gtccttgagagcctccagag

SEQ ID NO: 22589 - RNA, 20 nt, synthetic construct
  source 1..20: mol_type = other RNA
gtctacatgatttggcccca

SEQ ID NO: 22590 - RNA, 20 nt, synthetic construct
  source 1..20: mol_type = other RNA
gtctagtagagtgcctggga

SEQ ID NO: 22591 - RNA, 20 nt, synthetic construct
  source 1..20: mol_type = other RNA
gtcttgaactcccaacttca

SEQ ID NO: 22592 - RNA, 20 nt, synthetic construct
  source 1..20: mol_type = other RNA
gtgaaataccctggcaatat

SEQ ID NO: 22593 - RNA, 20 nt, synthetic construct
  source 1..20: mol_type = other RNA
gtgacagaagatactgctag

SEQ ID NO: 22594 - RNA, 20 nt, synthetic construct
  source 1..20: mol_type = other RNA
gtgacttggtatctttccct

SEQ ID NO: 22595 - RNA, 20 nt, synthetic construct
  source 1..20: mol_type = other RNA
gtgagctgagatctcaccac

SEQ ID NO: 22596 - RNA, 20 nt, synthetic construct
  source 1..20: mol_type = other RNA
gtgatgtgttaaggaatgct

SEQ ID NO: 22597 - RNA, 20 nt, synthetic construct
  source 1..20: mol_type = other RNA
gtgattcctgggactacagg

SEQ ID NO: 22598 - RNA, 20 nt, synthetic construct
  source 1..20: mol_type = other RNA
gtgcagtgtgcagtggtgag

SEQ ID NO: 22599 - RNA, 20 nt, synthetic construct
  source 1..20: mol_type = other RNA
gtgcctgatatagcttgaca

SEQ ID NO: 22600 - RNA, 20 nt, synthetic construct
  source 1..20: mol_type = other RNA
gtgcctgggacatagcaatt

SEQ ID NO: 22601 - RNA, 20 nt, synthetic construct
  source 1..20: mol_type = other RNA
gtgcctgtagtcccaggaat

SEQ ID NO: 22602 - RNA, 20 nt, synthetic construct
  source 1..20: mol_type = other RNA
gtgctgagagggcatcagaa

SEQ ID NO: 22603 - RNA, 20 nt, synthetic construct
  source 1..20: mol_type = other RNA
gtggaaacagagtacaataa

SEQ ID NO: 22604 - RNA, 20 nt, synthetic construct
  source 1..20: mol_type = other RNA
gtggaaatggaattgggaga

SEQ ID NO: 22605 - RNA, 20 nt, synthetic construct
  source 1..20: mol_type = other RNA
gtggaagctcatttggccag

SEQ ID NO: 22606 - RNA, 20 nt, synthetic construct
  source 1..20: mol_type = other RNA
gtggatcaacccaaggtatg

SEQ ID NO: 22607 - RNA, 20 nt, synthetic construct
  source 1..20: mol_type = other RNA
gtggcagatgttattatctg

SEQ ID NO: 22608 - RNA, 20 nt, synthetic construct
  source 1..20: mol_type = other RNA
gtggcttgttgggaaggtgg

SEQ ID NO: 22609 - RNA, 20 nt, synthetic construct
  source 1..20: mol_type = other RNA
gtggtgtgtgcctgtagtcc

SEQ ID NO: 22610 - RNA, 20 nt, synthetic construct
  source 1..20: mol_type = other RNA
gtgtagatcaaggcaggagc

SEQ ID NO: 22611 - RNA, 20 nt, synthetic construct
  source 1..20: mol_type = other RNA
gtgtcaagctatatcaggca

SEQ ID NO: 22612 - RNA, 20 nt, synthetic construct
  source 1..20: mol_type = other RNA
gtgtctagtagagtgcctgg

SEQ ID NO: 22613 - RNA, 20 nt, synthetic construct
  source 1..20: mol_type = other RNA
gtgtgcagtggtgagatctc

SEQ ID NO: 22614 - RNA, 20 nt, synthetic construct
  source 1..20: mol_type = other RNA
gtgtgcctgtagtcccagga

SEQ ID NO: 22615 - RNA, 20 nt, synthetic construct
  source 1..20: mol_type = other RNA
gtgtgtgcctgtagtcccag

SEQ ID NO: 22616 - RNA, 20 nt, synthetic construct
  source 1..20: mol_type = other RNA
gtgttaaggaatgctatgag

SEQ ID NO: 22617 - RNA, 20 nt, synthetic construct
  source 1..20: mol_type = other RNA
gtgtttacatttggtcatcg

SEQ ID NO: 22618 - RNA, 20 nt, synthetic construct
  source 1..20: mol_type = other RNA
gttaaggaatgctatgagtg

SEQ ID NO: 22619 - RNA, 20 nt, synthetic construct
  source 1..20: mol_type = other RNA
gttagccccaagtgaaatac

SEQ ID NO: 22620 - RNA, 20 nt, synthetic construct
  source 1..20: mol_type = other RNA
gttattatctgaggttccta

SEQ ID NO: 22621 - RNA, 20 nt, synthetic construct
  source 1..20: mol_type = other RNA
gttattgtactctgtttcca

SEQ ID NO: 22622 - RNA, 20 nt, synthetic construct
  source 1..20: mol_type = other RNA
gttcaagtgattcctgggac

SEQ ID NO: 22623 - RNA, 20 nt, synthetic construct
  source 1..20: mol_type = other RNA
gttcataatagcccccatca

SEQ ID NO: 22624 - RNA, 20 nt, synthetic construct
  source 1..20: mol_type = other RNA
gttcatttctcagttcataa

SEQ ID NO: 22625 - RNA, 20 nt, synthetic construct
  source 1..20: mol_type = other RNA
gttcctaagtggatcaaccc

SEQ ID NO: 22626 - RNA, 20 nt, synthetic construct
  source 1..20: mol_type = other RNA
gttcctgctcctgccttgat

SEQ ID NO: 22627 - RNA, 20 nt, synthetic construct
  source 1..20: mol_type = other RNA
gttgatccacttaggaacct

SEQ ID NO: 22628 - RNA, 20 nt, synthetic construct
  source 1..20: mol_type = other RNA
gttgggaaggtggaagctca

SEQ ID NO: 22629 - RNA, 20 nt, synthetic construct
  source 1..20: mol_type = other RNA
gtttacatttggtcatcgat

SEQ ID NO: 22630 - RNA, 20 nt, synthetic construct
  source 1..20: mol_type = other RNA
gtttagaaaatcagatgggt

SEQ ID NO: 22631 - RNA, 20 nt, synthetic construct
  source 1..20: mol_type = other RNA
gtttatgcctttctttttgg

SEQ ID NO: 22632 - RNA, 20 nt, synthetic construct
  source 1..20: mol_type = other RNA
gtttattcttcaaaatggag

SEQ ID NO: 22633 - RNA, 20 nt, synthetic construct
  source 1..20: mol_type = other RNA
gtttccaccccttccatttt

SEQ ID NO: 22634 - RNA, 20 nt, synthetic construct
  source 1..20: mol_type = other RNA
taaaaatgcagcgcaatctc

SEQ ID NO: 22635 - RNA, 20 nt, synthetic construct
  source 1..20: mol_type = other RNA
taaacacttggtgcctgata

SEQ ID NO: 22636 - RNA, 20 nt, synthetic construct
  source 1..20: mol_type = other RNA
taaaccgtgacttggtatct

SEQ ID NO: 22637 - RNA, 20 nt, synthetic construct
  source 1..20: mol_type = other RNA
taaactgtatgaagtgtcta

SEQ ID NO: 22638 - RNA, 20 nt, synthetic construct
  source 1..20: mol_type = other RNA
taaagaacataccttgggtt

SEQ ID NO: 22639 - RNA, 20 nt, synthetic construct
  source 1..20: mol_type = other RNA
taacacatcactcaagagtc

SEQ ID NO: 22640 - RNA, 20 nt, synthetic construct
  source 1..20: mol_type = other RNA
taacatctgccacgtataga

SEQ ID NO: 22641 - RNA, 20 nt, synthetic construct
  source 1..20: mol_type = other RNA
taacatgagtaatttgatgg

SEQ ID NO: 22642 - RNA, 20 nt, synthetic construct
  source 1..20: mol_type = other RNA
taacttggtgtcaagctata

SEQ ID NO: 22643 - RNA, 20 nt, synthetic construct
  source 1..20: mol_type = other RNA
taagagcctttctctggagg

SEQ ID NO: 22644 - RNA, 20 nt, synthetic construct
  source 1..20: mol_type = other RNA
taaggaatgctatgagtgct

SEQ ID NO: 22645 - RNA, 20 nt, synthetic construct
  source 1..20: mol_type = other RNA
taagtggatcaacccaaggt

SEQ ID NO: 22646 - RNA, 20 nt, synthetic construct
  source 1..20: mol_type = other RNA
taataacatctgccacgtat

SEQ ID NO: 22647 - RNA, 20 nt, synthetic construct
  source 1..20: mol_type = other RNA
taatagcccccatcaaatta

SEQ ID NO: 22648 - RNA, 20 nt, synthetic construct
  source 1..20: mol_type = other RNA
taatattgccagggtatttc

SEQ ID NO: 22649 - RNA, 20 nt, synthetic construct
  source 1..20: mol_type = other RNA
taatgtgtcttttcccgata

SEQ ID NO: 22650 - RNA, 20 nt, synthetic construct
  source 1..20: mol_type = other RNA
taattcctctatacatgcct

SEQ ID NO: 22651 - RNA, 20 nt, synthetic construct
  source 1..20: mol_type = other RNA
taatttgatgggggctatta

SEQ ID NO: 22652 - RNA, 20 nt, synthetic construct
  source 1..20: mol_type = other RNA
tacacccatctgattttcta

SEQ ID NO: 22653 - RNA, 20 nt, synthetic construct
  source 1..20: mol_type = other RNA
tacagtttagaaaatcagat

SEQ ID NO: 22654 - RNA, 20 nt, synthetic construct
  source 1..20: mol_type = other RNA
tacatgatttggccccaaga

SEQ ID NO: 22655 - RNA, 20 nt, synthetic construct
  source 1..20: mol_type = other RNA
tacatgccttttttgttttt

SEQ ID NO: 22656 - RNA, 20 nt, synthetic construct
  source 1..20: mol_type = other RNA
tacatttggtcatcgatttc

SEQ ID NO: 22657 - RNA, 20 nt, synthetic construct
  source 1..20: mol_type = other RNA
taccaagtcacggtttattc

SEQ ID NO: 22658 - RNA, 20 nt, synthetic construct
  source 1..20: mol_type = other RNA
taccctggcaatattaatgt

SEQ ID NO: 22659 - RNA, 20 nt, synthetic construct
  source 1..20: mol_type = other RNA
taccttgggttgatccactt

SEQ ID NO: 22660 - RNA, 20 nt, synthetic construct
  source 1..20: mol_type = other RNA
tacgtggcagatgttattat

SEQ ID NO: 22661 - RNA, 20 nt, synthetic construct
  source 1..20: mol_type = other RNA
tactagacacttcatacagt

SEQ ID NO: 22662 - RNA, 20 nt, synthetic construct
  source 1..20: mol_type = other RNA
tactcatgttattgtactct

SEQ ID NO: 22663 - RNA, 20 nt, synthetic construct
  source 1..20: mol_type = other RNA
tactctgtttccaccccttc

SEQ ID NO: 22664 - RNA, 20 nt, synthetic construct
  source 1..20: mol_type = other RNA
tactgctagaaatctgctag

SEQ ID NO: 22665 - RNA, 20 nt, synthetic construct
  source 1..20: mol_type = other RNA
tacttttcaaagttcatttc

SEQ ID NO: 22666 - RNA, 20 nt, synthetic construct
  source 1..20: mol_type = other RNA
tagaaaatcagatgggtgta

SEQ ID NO: 22667 - RNA, 20 nt, synthetic construct
  source 1..20: mol_type = other RNA
tagaaatctgctagaaaaaa

SEQ ID NO: 22668 - RNA, 20 nt, synthetic construct
  source 1..20: mol_type = other RNA
tagacacttcatacagttta

SEQ ID NO: 22669 - RNA, 20 nt, synthetic construct
  source 1..20: mol_type = other RNA
tagactcttgagtgatgtgt

SEQ ID NO: 22670 - RNA, 20 nt, synthetic construct
  source 1..20: mol_type = other RNA
tagagcaattgctatgtccc

SEQ ID NO: 22671 - RNA, 20 nt, synthetic construct
  source 1..20: mol_type = other RNA
tagaggaattatgagggaaa

SEQ ID NO: 22672 - RNA, 20 nt, synthetic construct
  source 1..20: mol_type = other RNA
tagagtgcctgggacatagc

SEQ ID NO: 22673 - RNA, 20 nt, synthetic construct
  source 1..20: mol_type = other RNA
tagatcaaggcaggagcagg

SEQ ID NO: 22674 - RNA, 20 nt, synthetic construct
  source 1..20: mol_type = other RNA
tagcaattgctctatacgtg

SEQ ID NO: 22675 - RNA, 20 nt, synthetic construct
  source 1..20: mol_type = other RNA
tagcagatttctagcagtat

SEQ ID NO: 22676 - RNA, 20 nt, synthetic construct
  source 1..20: mol_type = other RNA
tagcagtatcttctgtcact

SEQ ID NO: 22677 - RNA, 20 nt, synthetic construct
  source 1..20: mol_type = other RNA
tagcattccttaacacatca

SEQ ID NO: 22678 - RNA, 20 nt, synthetic construct
  source 1..20: mol_type = other RNA
tagccccaagtgaaataccc

SEQ ID NO: 22679 - RNA, 20 nt, synthetic construct
  source 1..20: mol_type = other RNA
tagcccccatcaaattactc

SEQ ID NO: 22680 - RNA, 20 nt, synthetic construct
  source 1..20: mol_type = other RNA
tagcttgacaccaagttagc

SEQ ID NO: 22681 - RNA, 20 nt, synthetic construct
  source 1..20: mol_type = other RNA
taggaacctcagataataac

SEQ ID NO: 22682 - RNA, 20 nt, synthetic construct
  source 1..20: mol_type = other RNA
tagtagagtgcctgggacat

SEQ ID NO: 22683 - RNA, 20 nt, synthetic construct
  source 1..20: mol_type = other RNA
tagtcccaggaatcacttga

SEQ ID NO: 22684 - RNA, 20 nt, synthetic construct
  source 1..20: mol_type = other RNA
tatacatgccttttttgttt

SEQ ID NO: 22685 - RNA, 20 nt, synthetic construct
  source 1..20: mol_type = other RNA
tatacgtggcagatgttatt

SEQ ID NO: 22686 - RNA, 20 nt, synthetic construct
  source 1..20: mol_type = other RNA
tatagagcaattgctatgtc

SEQ ID NO: 22687 - RNA, 20 nt, synthetic construct
  source 1..20: mol_type = other RNA
tatagaggaattatgaggga

SEQ ID NO: 22688 - RNA, 20 nt, synthetic construct
  source 1..20: mol_type = other RNA
tatagcttgacaccaagtta

SEQ ID NO: 22689 - RNA, 20 nt, synthetic construct
  source 1..20: mol_type = other RNA
tatatcaggcaccaagtgtt

SEQ ID NO: 22690 - RNA, 20 nt, synthetic construct
  source 1..20: mol_type = other RNA
tatcaggcaccaagtgttta

SEQ ID NO: 22691 - RNA, 20 nt, synthetic construct
  source 1..20: mol_type = other RNA
tatcgggaaaagacacatta

SEQ ID NO: 22692 - RNA, 20 nt, synthetic construct
  source 1..20: mol_type = other RNA
tatctgaggttcctaagtgg

SEQ ID NO: 22693 - RNA, 20 nt, synthetic construct
  source 1..20: mol_type = other RNA
tatcttctgtcactggagat

SEQ ID NO: 22694 - RNA, 20 nt, synthetic construct
  source 1..20: mol_type = other RNA
tatcttggggccaaatcatg

SEQ ID NO: 22695 - RNA, 20 nt, synthetic construct
  source 1..20: mol_type = other RNA
tatctttccctcataattcc

SEQ ID NO: 22696 - RNA, 20 nt, synthetic construct
  source 1..20: mol_type = other RNA
tatgaactgagaaatgaact

SEQ ID NO: 22697 - RNA, 20 nt, synthetic construct
  source 1..20: mol_type = other RNA
tatgaagtgtctagtagagt

SEQ ID NO: 22698 - RNA, 20 nt, synthetic construct
  source 1..20: mol_type = other RNA
tatgagggaaagataccaag

SEQ ID NO: 22699 - RNA, 20 nt, synthetic construct
  source 1..20: mol_type = other RNA
tatgagtgctgagagggcat

SEQ ID NO: 22700 - RNA, 20 nt, synthetic construct
  source 1..20: mol_type = other RNA
tatgcctttctttttggttc

SEQ ID NO: 22701 - RNA, 20 nt, synthetic construct
  source 1..20: mol_type = other RNA
tatgtcccaggcactctact

SEQ ID NO: 22702 - RNA, 20 nt, synthetic construct
  source 1..20: mol_type = other RNA
tatgtttatgcctttctttt

SEQ ID NO: 22703 - RNA, 20 nt, synthetic construct
  source 1..20: mol_type = other RNA
tattaatgtgtcttttcccg

SEQ ID NO: 22704 - RNA, 20 nt, synthetic construct
  source 1..20: mol_type = other RNA
tattatctgaggttcctaag

SEQ ID NO: 22705 - RNA, 20 nt, synthetic construct
  source 1..20: mol_type = other RNA
tattatgaactgagaaatga

SEQ ID NO: 22706 - RNA, 20 nt, synthetic construct
  source 1..20: mol_type = other RNA
tattcttcaaaatggaggtg

SEQ ID NO: 22707 - RNA, 20 nt, synthetic construct
  source 1..20: mol_type = other RNA
tattgccagggtatttcact

SEQ ID NO: 22708 - RNA, 20 nt, synthetic construct
  source 1..20: mol_type = other RNA
tattgtactctgtttccacc

SEQ ID NO: 22709 - RNA, 20 nt, synthetic construct
  source 1..20: mol_type = other RNA
tatttcacttggggctaact

SEQ ID NO: 22710 - RNA, 20 nt, synthetic construct
  source 1..20: mol_type = other RNA
tattttttgggatggaatct

SEQ ID NO: 22711 - RNA, 20 nt, synthetic construct
  source 1..20: mol_type = other RNA
tcaaaatggaggtggcttgt

SEQ ID NO: 22712 - RNA, 20 nt, synthetic construct
  source 1..20: mol_type = other RNA
tcaaagttcatttctcagtt

SEQ ID NO: 22713 - RNA, 20 nt, synthetic construct
  source 1..20: mol_type = other RNA
tcaaattactcatgttattg

SEQ ID NO: 22714 - RNA, 20 nt, synthetic construct
  source 1..20: mol_type = other RNA
tcaacccaaggtatgttctt

SEQ ID NO: 22715 - RNA, 20 nt, synthetic construct
  source 1..20: mol_type = other RNA
tcaagagtctacatgatttg

SEQ ID NO: 22716 - RNA, 20 nt, synthetic construct
  source 1..20: mol_type = other RNA
tcaagctatatcaggcacca

SEQ ID NO: 22717 - RNA, 20 nt, synthetic construct
  source 1..20: mol_type = other RNA
tcaaggacttctgatgccct

SEQ ID NO: 22718 - RNA, 20 nt, synthetic construct
  source 1..20: mol_type = other RNA
tcaaggcaggagcaggaacc

SEQ ID NO: 22719 - RNA, 20 nt, synthetic construct
  source 1..20: mol_type = other RNA
tcaagtgattcctgggacta

SEQ ID NO: 22720 - RNA, 20 nt, synthetic construct
  source 1..20: mol_type = other RNA
tcaccactgcacactgcact

SEQ ID NO: 22721 - RNA, 20 nt, synthetic construct
  source 1..20: mol_type = other RNA
tcacggtttattcttcaaaa

SEQ ID NO: 22722 - RNA, 20 nt, synthetic construct
  source 1..20: mol_type = other RNA
tcactcaagagtctacatga

SEQ ID NO: 22723 - RNA, 20 nt, synthetic construct
  source 1..20: mol_type = other RNA
tcactggagattgcgctgca

SEQ ID NO: 22724 - RNA, 20 nt, synthetic construct
  source 1..20: mol_type = other RNA
tcacttggggctaacttggt

SEQ ID NO: 22725 - RNA, 20 nt, synthetic construct
  source 1..20: mol_type = other RNA
tcagaagtccttgagagcct

SEQ ID NO: 22726 - RNA, 20 nt, synthetic construct
  source 1..20: mol_type = other RNA
tcagataataacatctgcca

SEQ ID NO: 22727 - RNA, 20 nt, synthetic construct
  source 1..20: mol_type = other RNA
tcagatgggtgtagatcaag

SEQ ID NO: 22728 - RNA, 20 nt, synthetic construct
  source 1..20: mol_type = other RNA
tcagcactcatagcattcct

SEQ ID NO: 22729 - RNA, 20 nt, synthetic construct
  source 1..20: mol_type = other RNA
tcaggcaccaagtgtttaca

SEQ ID NO: 22730 - RNA, 20 nt, synthetic construct
  source 1..20: mol_type = other RNA
tcagttcataatagccccca

SEQ ID NO: 22731 - RNA, 20 nt, synthetic construct
  source 1..20: mol_type = other RNA
tcataatagcccccatcaaa

SEQ ID NO: 22732 - RNA, 20 nt, synthetic construct
  source 1..20: mol_type = other RNA
tcataattcctctatacatg

SEQ ID NO: 22733 - RNA, 20 nt, synthetic construct
  source 1..20: mol_type = other RNA
tcatacagtttagaaaatca

SEQ ID NO: 22734 - RNA, 20 nt, synthetic construct
  source 1..20: mol_type = other RNA
tcatagcattccttaacaca

SEQ ID NO: 22735 - RNA, 20 nt, synthetic construct
  source 1..20: mol_type = other RNA
tcatcgatttctcccaattc

SEQ ID NO: 22736 - RNA, 20 nt, synthetic construct
  source 1..20: mol_type = other RNA
tcatgtagactcttgagtga

SEQ ID NO: 22737 - RNA, 20 nt, synthetic construct
  source 1..20: mol_type = other RNA
tcatgttattgtactctgtt

SEQ ID NO: 22738 - RNA, 20 nt, synthetic construct
  source 1..20: mol_type = other RNA
tcatttctcagttcataata

SEQ ID NO: 22739 - RNA, 20 nt, synthetic construct
  source 1..20: mol_type = other RNA
tcatttggccagagtggaaa

SEQ ID NO: 22740 - RNA, 20 nt, synthetic construct
  source 1..20: mol_type = other RNA
tccaccttcccaacaagcca

SEQ ID NO: 22741 - RNA, 20 nt, synthetic construct
  source 1..20: mol_type = other RNA
tccactctggccaaatgagc

SEQ ID NO: 22742 - RNA, 20 nt, synthetic construct
  source 1..20: mol_type = other RNA
tccacttaggaacctcagat

SEQ ID NO: 22743 - RNA, 20 nt, synthetic construct
  source 1..20: mol_type = other RNA
tccagagaaaggctcttaaa

SEQ ID NO: 22744 - RNA, 20 nt, synthetic construct
  source 1..20: mol_type = other RNA
tccagcctgggcaatggaat

SEQ ID NO: 22745 - RNA, 20 nt, synthetic construct
  source 1..20: mol_type = other RNA
tccagtgacagaagatactg

SEQ ID NO: 22746 - RNA, 20 nt, synthetic construct
  source 1..20: mol_type = other RNA
tccattgcccaggctggagt

SEQ ID NO: 22747 - RNA, 20 nt, synthetic construct
  source 1..20: mol_type = other RNA
tccatttccactctggccaa

SEQ ID NO: 22748 - RNA, 20 nt, synthetic construct
  source 1..20: mol_type = other RNA
tccattttgaagaataaacc

SEQ ID NO: 22749 - RNA, 20 nt, synthetic construct
  source 1..20: mol_type = other RNA
tcccaacaagccacctccat

SEQ ID NO: 22750 - RNA, 20 nt, synthetic construct
  source 1..20: mol_type = other RNA
tcccaacttcaagtgatcag

SEQ ID NO: 22751 - RNA, 20 nt, synthetic construct
  source 1..20: mol_type = other RNA
tcccaattccatttccactc

SEQ ID NO: 22752 - RNA, 20 nt, synthetic construct
  source 1..20: mol_type = other RNA
tcccaggaatcacttgaacc

SEQ ID NO: 22753 - RNA, 20 nt, synthetic construct
  source 1..20: mol_type = other RNA
tcccaggcactctactagac

SEQ ID NO: 22754 - RNA, 20 nt, synthetic construct
  source 1..20: mol_type = other RNA
tccctcataattcctctata

SEQ ID NO: 22755 - RNA, 20 nt, synthetic construct
  source 1..20: mol_type = other RNA
tcctaagtggatcaacccaa

SEQ ID NO: 22756 - RNA, 20 nt, synthetic construct
  source 1..20: mol_type = other RNA
tcctctatacatgccttttt

SEQ ID NO: 22757 - RNA, 20 nt, synthetic construct
  source 1..20: mol_type = other RNA
tcctgccttgatctacaccc

SEQ ID NO: 22758 - RNA, 20 nt, synthetic construct
  source 1..20: mol_type = other RNA
tcctgctcctgccttgatct

SEQ ID NO: 22759 - RNA, 20 nt, synthetic construct
  source 1..20: mol_type = other RNA
tcctgggttcaagtgattcc

SEQ ID NO: 22760 - RNA, 20 nt, synthetic construct
  source 1..20: mol_type = other RNA
tccttaacacatcactcaag

SEQ ID NO: 22761 - RNA, 20 nt, synthetic construct
  source 1..20: mol_type = other RNA
tccttgagagcctccagaga

SEQ ID NO: 22762 - RNA, 20 nt, synthetic construct
  source 1..20: mol_type = other RNA
tcgatgaccaaatgtaaaca

SEQ ID NO: 22763 - RNA, 20 nt, synthetic construct
  source 1..20: mol_type = other RNA
tcgatttctcccaattccat

SEQ ID NO: 22764 - RNA, 20 nt, synthetic construct
  source 1..20: mol_type = other RNA
tcgggaaaagacacattaat

SEQ ID NO: 22765 - RNA, 20 nt, synthetic construct
  source 1..20: mol_type = other RNA
tctaaactgtatgaagtgtc

SEQ ID NO: 22766 - RNA, 20 nt, synthetic construct
  source 1..20: mol_type = other RNA
tctacacccatctgattttc

SEQ ID NO: 22767 - RNA, 20 nt, synthetic construct
  source 1..20: mol_type = other RNA
tctacatgatttggccccaa

SEQ ID NO: 22768 - RNA, 20 nt, synthetic construct
  source 1..20: mol_type = other RNA
tctactagacacttcataca

SEQ ID NO: 22769 - RNA, 20 nt, synthetic construct
  source 1..20: mol_type = other RNA
tctagcagatttctagcagt

SEQ ID NO: 22770 - RNA, 20 nt, synthetic construct
  source 1..20: mol_type = other RNA
tctagcagtatcttctgtca

SEQ ID NO: 22771 - RNA, 20 nt, synthetic construct
  source 1..20: mol_type = other RNA
tctagtagagtgcctgggac

SEQ ID NO: 22772 - RNA, 20 nt, synthetic construct
  source 1..20: mol_type = other RNA
tctatacatgccttttttgt

SEQ ID NO: 22773 - RNA, 20 nt, synthetic construct
  source 1..20: mol_type = other RNA
tctatacgtggcagatgtta

SEQ ID NO: 22774 - RNA, 20 nt, synthetic construct
  source 1..20: mol_type = other RNA
tctcaaggacttctgatgcc

SEQ ID NO: 22775 - RNA, 20 nt, synthetic construct
  source 1..20: mol_type = other RNA
tctcaccactgcacactgca

SEQ ID NO: 22776 - RNA, 20 nt, synthetic construct
  source 1..20: mol_type = other RNA
tctcagcactcatagcattc

SEQ ID NO: 22777 - RNA, 20 nt, synthetic construct
  source 1..20: mol_type = other RNA
tctcagttcataatagcccc

SEQ ID NO: 22778 - RNA, 20 nt, synthetic construct
  source 1..20: mol_type = other RNA
tctccagtgacagaagatac

SEQ ID NO: 22779 - RNA, 20 nt, synthetic construct
  source 1..20: mol_type = other RNA
tctcccaattccatttccac

SEQ ID NO: 22780 - RNA, 20 nt, synthetic construct
  source 1..20: mol_type = other RNA
tctctggaggctctcaagga

SEQ ID NO: 22781 - RNA, 20 nt, synthetic construct
  source 1..20: mol_type = other RNA
tctgaggttcctaagtggat

SEQ ID NO: 22782 - RNA, 20 nt, synthetic construct
  source 1..20: mol_type = other RNA
tctgatgccctctcagcact

SEQ ID NO: 22783 - RNA, 20 nt, synthetic construct
  source 1..20: mol_type = other RNA
tctgattttctaaactgtat

SEQ ID NO: 22784 - RNA, 20 nt, synthetic construct
  source 1..20: mol_type = other RNA
tctgccacgtatagagcaat

SEQ ID NO: 22785 - RNA, 20 nt, synthetic construct
  source 1..20: mol_type = other RNA
tctggaggctctcaaggact

SEQ ID NO: 22786 - RNA, 20 nt, synthetic construct
  source 1..20: mol_type = other RNA
tctggccaaatgagcttcca

SEQ ID NO: 22787 - RNA, 20 nt, synthetic construct
  source 1..20: mol_type = other RNA
tctgtcactggagattgcgc

SEQ ID NO: 22788 - RNA, 20 nt, synthetic construct
  source 1..20: mol_type = other RNA
tctgtttccaccccttccat

SEQ ID NO: 22789 - RNA, 20 nt, synthetic construct
  source 1..20: mol_type = other RNA
tcttaaaaatgcagcgcaat

SEQ ID NO: 22790 - RNA, 20 nt, synthetic construct
  source 1..20: mol_type = other RNA
tcttatgtttatgcctttct

SEQ ID NO: 22791 - RNA, 20 nt, synthetic construct
  source 1..20: mol_type = other RNA
tcttcaaaatggaggtggct

SEQ ID NO: 22792 - RNA, 20 nt, synthetic construct
  source 1..20: mol_type = other RNA
tcttctgtcactggagattg

SEQ ID NO: 22793 - RNA, 20 nt, synthetic construct
  source 1..20: mol_type = other RNA
tcttgaactcccaacttcaa

SEQ ID NO: 22794 - RNA, 20 nt, synthetic construct
  source 1..20: mol_type = other RNA
tcttgagtgatgtgttaagg

SEQ ID NO: 22795 - RNA, 20 nt, synthetic construct
  source 1..20: mol_type = other RNA
tcttggggccaaatcatgta

SEQ ID NO: 22796 - RNA, 20 nt, synthetic construct
  source 1..20: mol_type = other RNA
tctttccctcataattcctc

SEQ ID NO: 22797 - RNA, 20 nt, synthetic construct
  source 1..20: mol_type = other RNA
tctttttggttcctgctcct

SEQ ID NO: 22798 - RNA, 20 nt, synthetic construct
  source 1..20: mol_type = other RNA
tgaaaagtatcttggggcca

SEQ ID NO: 22799 - RNA, 20 nt, synthetic construct
  source 1..20: mol_type = other RNA
tgaaataccctggcaatatt

SEQ ID NO: 22800 - RNA, 20 nt, synthetic construct
  source 1..20: mol_type = other RNA
tgaactcccaacttcaagtg

SEQ ID NO: 22801 - RNA, 20 nt, synthetic construct
  source 1..20: mol_type = other RNA
tgaactgagaaatgaacttt

SEQ ID NO: 22802 - RNA, 20 nt, synthetic construct
  source 1..20: mol_type = other RNA
tgaactttgaaaagtatctt

SEQ ID NO: 22803 - RNA, 20 nt, synthetic construct
  source 1..20: mol_type = other RNA
tgaagaataaaccgtgactt

SEQ ID NO: 22804 - RNA, 20 nt, synthetic construct
  source 1..20: mol_type = other RNA
tgaagtgtctagtagagtgc

SEQ ID NO: 22805 - RNA, 20 nt, synthetic construct
  source 1..20: mol_type = other RNA
tgacaccaagttagccccaa

SEQ ID NO: 22806 - RNA, 20 nt, synthetic construct
  source 1..20: mol_type = other RNA
tgacagaagatactgctaga

SEQ ID NO: 22807 - RNA, 20 nt, synthetic construct
  source 1..20: mol_type = other RNA
tgaccaaatgtaaacacttg

SEQ ID NO: 22808 - RNA, 20 nt, synthetic construct
  source 1..20: mol_type = other RNA
tgacttggtatctttccctc

SEQ ID NO: 22809 - RNA, 20 nt, synthetic construct
  source 1..20: mol_type = other RNA
tgagaaatgaactttgaaaa

SEQ ID NO: 22810 - RNA, 20 nt, synthetic construct
  source 1..20: mol_type = other RNA
tgagagcctccagagaaagg

SEQ ID NO: 22811 - RNA, 20 nt, synthetic construct
  source 1..20: mol_type = other RNA
tgagagggcatcagaagtcc

SEQ ID NO: 22812 - RNA, 20 nt, synthetic construct
  source 1..20: mol_type = other RNA
tgagatctcaccactgcaca

SEQ ID NO: 22813 - RNA, 20 nt, synthetic construct
  source 1..20: mol_type = other RNA
tgagattccatcccaaaaaa

SEQ ID NO: 22814 - RNA, 20 nt, synthetic construct
  source 1..20: mol_type = other RNA
tgagctgagatctcaccact

SEQ ID NO: 22815 - RNA, 20 nt, synthetic construct
  source 1..20: mol_type = other RNA
tgagcttccaccttcccaac

SEQ ID NO: 22816 - RNA, 20 nt, synthetic construct
  source 1..20: mol_type = other RNA
tgaggaatatcgggaaaaga

SEQ ID NO: 22817 - RNA, 20 nt, synthetic construct
  source 1..20: mol_type = other RNA
tgagggaaagataccaagtc

SEQ ID NO: 22818 - RNA, 20 nt, synthetic construct
  source 1..20: mol_type = other RNA
tgaggttcctaagtggatca

SEQ ID NO: 22819 - RNA, 20 nt, synthetic construct
  source 1..20: mol_type = other RNA
tgagtaatttgatgggggct

SEQ ID NO: 22820 - RNA, 20 nt, synthetic construct
  source 1..20: mol_type = other RNA
tgagtgatgtgttaaggaat

SEQ ID NO: 22821 - RNA, 20 nt, synthetic construct
  source 1..20: mol_type = other RNA
tgagtgctgagagggcatca

SEQ ID NO: 22822 - RNA, 20 nt, synthetic construct
  source 1..20: mol_type = other RNA
tgatatagcttgacaccaag

SEQ ID NO: 22823 - RNA, 20 nt, synthetic construct
  source 1..20: mol_type = other RNA
tgatcacttgaagttgggag

SEQ ID NO: 22824 - RNA, 20 nt, synthetic construct
  source 1..20: mol_type = other RNA
tgatccacttaggaacctca

SEQ ID NO: 22825 - RNA, 20 nt, synthetic construct
  source 1..20: mol_type = other RNA
tgatctacacccatctgatt

SEQ ID NO: 22826 - RNA, 20 nt, synthetic construct
  source 1..20: mol_type = other RNA
tgatgccctctcagcactca

SEQ ID NO: 22827 - RNA, 20 nt, synthetic construct
  source 1..20: mol_type = other RNA
tgatgggggctattatgaac

SEQ ID NO: 22828 - RNA, 20 nt, synthetic construct
  source 1..20: mol_type = other RNA
tgatgtgttaaggaatgcta

SEQ ID NO: 22829 - RNA, 20 nt, synthetic construct
  source 1..20: mol_type = other RNA
tgattcctgggactacaggc

SEQ ID NO: 22830 - RNA, 20 nt, synthetic construct
  source 1..20: mol_type = other RNA
tgatttggccccaagatact

SEQ ID NO: 22831 - RNA, 20 nt, synthetic construct
  source 1..20: mol_type = other RNA
tgattttctaaactgtatga

SEQ ID NO: 22832 - RNA, 20 nt, synthetic construct
  source 1..20: mol_type = other RNA
tgcagcgcaatctccagtga

SEQ ID NO: 22833 - RNA, 20 nt, synthetic construct
  source 1..20: mol_type = other RNA
tgcagtgtgcagtggtgaga

SEQ ID NO: 22834 - RNA, 20 nt, synthetic construct
  source 1..20: mol_type = other RNA
tgcatttttaagagcctttc

SEQ ID NO: 22835 - RNA, 20 nt, synthetic construct
  source 1..20: mol_type = other RNA
tgccacgtatagagcaattg

SEQ ID NO: 22836 - RNA, 20 nt, synthetic construct
  source 1..20: mol_type = other RNA
tgccagggtatttcacttgg

SEQ ID NO: 22837 - RNA, 20 nt, synthetic construct
  source 1..20: mol_type = other RNA
tgccctctcagcactcatag

SEQ ID NO: 22838 - RNA, 20 nt, synthetic construct
  source 1..20: mol_type = other RNA
tgcctgatatagcttgacac

SEQ ID NO: 22839 - RNA, 20 nt, synthetic construct
  source 1..20: mol_type = other RNA
tgcctgggacatagcaattg

SEQ ID NO: 22840 - RNA, 20 nt, synthetic construct
  source 1..20: mol_type = other RNA
tgcctgtagtcccaggaatc

SEQ ID NO: 22841 - RNA, 20 nt, synthetic construct
  source 1..20: mol_type = other RNA
tgccttgatctacacccatc

SEQ ID NO: 22842 - RNA, 20 nt, synthetic construct
  source 1..20: mol_type = other RNA
tgcctttctttttggttcct

SEQ ID NO: 22843 - RNA, 20 nt, synthetic construct
  source 1..20: mol_type = other RNA
tgcgctgcatttttaagagc

SEQ ID NO: 22844 - RNA, 20 nt, synthetic construct
  source 1..20: mol_type = other RNA
tgctagaaatctgctagaaa

SEQ ID NO: 22845 - RNA, 20 nt, synthetic construct
  source 1..20: mol_type = other RNA
tgctatgagtgctgagaggg

SEQ ID NO: 22846 - RNA, 20 nt, synthetic construct
  source 1..20: mol_type = other RNA
tgctatgtcccaggcactct

SEQ ID NO: 22847 - RNA, 20 nt, synthetic construct
  source 1..20: mol_type = other RNA
tgctcctgccttgatctaca

SEQ ID NO: 22848 - RNA, 20 nt, synthetic construct
  source 1..20: mol_type = other RNA
tgctctatacgtggcagatg

SEQ ID NO: 22849 - RNA, 20 nt, synthetic construct
  source 1..20: mol_type = other RNA
tgctgagagggcatcagaag

SEQ ID NO: 22850 - RNA, 20 nt, synthetic construct
  source 1..20: mol_type = other RNA
tggaaacagagtacaataac

SEQ ID NO: 22851 - RNA, 20 nt, synthetic construct
  source 1..20: mol_type = other RNA
tggaaatggaattgggagaa

SEQ ID NO: 22852 - RNA, 20 nt, synthetic construct
  source 1..20: mol_type = other RNA
tggaagctcatttggccaga

SEQ ID NO: 22853 - RNA, 20 nt, synthetic construct
  source 1..20: mol_type = other RNA
tggaaggggtggaaacagag

SEQ ID NO: 22854 - RNA, 20 nt, synthetic construct
  source 1..20: mol_type = other RNA
tggaatctcattccattgcc

SEQ ID NO: 22855 - RNA, 20 nt, synthetic construct
  source 1..20: mol_type = other RNA
tggaatgagattccatccca

SEQ ID NO: 22856 - RNA, 20 nt, synthetic construct
  source 1..20: mol_type = other RNA
tggaattgggagaaatcgat

SEQ ID NO: 22857 - RNA, 20 nt, synthetic construct
  source 1..20: mol_type = other RNA
tggagattgcgctgcatttt

SEQ ID NO: 22858 - RNA, 20 nt, synthetic construct
  source 1..20: mol_type = other RNA
tggaggctctcaaggacttc

SEQ ID NO: 22859 - RNA, 20 nt, synthetic construct
  source 1..20: mol_type = other RNA
tggaggtggcttgttgggaa

SEQ ID NO: 22860 - RNA, 20 nt, synthetic construct
  source 1..20: mol_type = other RNA
tggagtgcagtgtgcagtgg

SEQ ID NO: 22861 - RNA, 20 nt, synthetic construct
  source 1..20: mol_type = other RNA
tggatcaacccaaggtatgt

SEQ ID NO: 22862 - RNA, 20 nt, synthetic construct
  source 1..20: mol_type = other RNA
tggcaatattaatgtgtctt

SEQ ID NO: 22863 - RNA, 20 nt, synthetic construct
  source 1..20: mol_type = other RNA
tggcagatgttattatctga

SEQ ID NO: 22864 - RNA, 20 nt, synthetic construct
  source 1..20: mol_type = other RNA
tggccaaatgagcttccacc

SEQ ID NO: 22865 - RNA, 20 nt, synthetic construct
  source 1..20: mol_type = other RNA
tggccagagtggaaatggaa

SEQ ID NO: 22866 - RNA, 20 nt, synthetic construct
  source 1..20: mol_type = other RNA
tggccccaagatacttttca

SEQ ID NO: 22867 - RNA, 20 nt, synthetic construct
  source 1..20: mol_type = other RNA
tggcttgttgggaaggtgga

SEQ ID NO: 22868 - RNA, 20 nt, synthetic construct
  source 1..20: mol_type = other RNA
tgggaaggtggaagctcatt

SEQ ID NO: 22869 - RNA, 20 nt, synthetic construct
  source 1..20: mol_type = other RNA
tgggacatagcaattgctct

SEQ ID NO: 22870 - RNA, 20 nt, synthetic construct
  source 1..20: mol_type = other RNA
tgggagaaatcgatgaccaa

SEQ ID NO: 22871 - RNA, 20 nt, synthetic construct
  source 1..20: mol_type = other RNA
tgggatggaatctcattcca

SEQ ID NO: 22872 - RNA, 20 nt, synthetic construct
  source 1..20: mol_type = other RNA
tgggcaatggaatgagattc

SEQ ID NO: 22873 - RNA, 20 nt, synthetic construct
  source 1..20: mol_type = other RNA
tggggccaaatcatgtagac

SEQ ID NO: 22874 - RNA, 20 nt, synthetic construct
  source 1..20: mol_type = other RNA
tggggctaacttggtgtcaa

SEQ ID NO: 22875 - RNA, 20 nt, synthetic construct
  source 1..20: mol_type = other RNA
tgggggctattatgaactga

SEQ ID NO: 22876 - RNA, 20 nt, synthetic construct
  source 1..20: mol_type = other RNA
tgggtgtagatcaaggcagg

SEQ ID NO: 22877 - RNA, 20 nt, synthetic construct
  source 1..20: mol_type = other RNA
tgggttcaagtgattcctgg

SEQ ID NO: 22878 - RNA, 20 nt, synthetic construct
  source 1..20: mol_type = other RNA
tgggttgatccacttaggaa

SEQ ID NO: 22879 - RNA, 20 nt, synthetic construct
  source 1..20: mol_type = other RNA
tggtatctttccctcataat

SEQ ID NO: 22880 - RNA, 20 nt, synthetic construct
  source 1..20: mol_type = other RNA
tggtcatcgatttctcccaa

SEQ ID NO: 22881 - RNA, 20 nt, synthetic construct
  source 1..20: mol_type = other RNA
tggtgcctgatatagcttga

SEQ ID NO: 22882 - RNA, 20 nt, synthetic construct
  source 1..20: mol_type = other RNA
tggtgtcaagctatatcagg

SEQ ID NO: 22883 - RNA, 20 nt, synthetic construct
  source 1..20: mol_type = other RNA
tggtgtgtgcctgtagtccc

SEQ ID NO: 22884 - RNA, 20 nt, synthetic construct
  source 1..20: mol_type = other RNA
tggttcctgctcctgccttg

SEQ ID NO: 22885 - RNA, 20 nt, synthetic construct
  source 1..20: mol_type = other RNA
tgtaaacacttggtgcctga

SEQ ID NO: 22886 - RNA, 20 nt, synthetic construct
  source 1..20: mol_type = other RNA
tgtactctgtttccacccct

SEQ ID NO: 22887 - RNA, 20 nt, synthetic construct
  source 1..20: mol_type = other RNA
tgtagactcttgagtgatgt

SEQ ID NO: 22888 - RNA, 20 nt, synthetic construct
  source 1..20: mol_type = other RNA
tgtagatcaaggcaggagca

SEQ ID NO: 22889 - RNA, 20 nt, synthetic construct
  source 1..20: mol_type = other RNA
tgtagtcccaggaatcactt

SEQ ID NO: 22890 - RNA, 20 nt, synthetic construct
  source 1..20: mol_type = other RNA
tgtatagaggaattatgagg

SEQ ID NO: 22891 - RNA, 20 nt, synthetic construct
  source 1..20: mol_type = other RNA
tgtatgaagtgtctagtaga

SEQ ID NO: 22892 - RNA, 20 nt, synthetic construct
  source 1..20: mol_type = other RNA
tgtcaagctatatcaggcac

SEQ ID NO: 22893 - RNA, 20 nt, synthetic construct
  source 1..20: mol_type = other RNA
tgtcactggagattgcgctg

SEQ ID NO: 22894 - RNA, 20 nt, synthetic construct
  source 1..20: mol_type = other RNA
tgtcccaggcactctactag

SEQ ID NO: 22895 - RNA, 20 nt, synthetic construct
  source 1..20: mol_type = other RNA
tgtctagtagagtgcctggg

SEQ ID NO: 22896 - RNA, 20 nt, synthetic construct
  source 1..20: mol_type = other RNA
tgtgcctgtagtcccaggaa

SEQ ID NO: 22897 - RNA, 20 nt, synthetic construct
  source 1..20: mol_type = other RNA
tgtgtgcctgtagtcccagg

SEQ ID NO: 22898 - RNA, 20 nt, synthetic construct
  source 1..20: mol_type = other RNA
tgtgttaaggaatgctatga

SEQ ID NO: 22899 - RNA, 20 nt, synthetic construct
  source 1..20: mol_type = other RNA
tgttaaggaatgctatgagt

SEQ ID NO: 22900 - RNA, 20 nt, synthetic construct
  source 1..20: mol_type = other RNA
tgttattatctgaggttcct

SEQ ID NO: 22901 - RNA, 20 nt, synthetic construct
  source 1..20: mol_type = other RNA
tgttattgtactctgtttcc

SEQ ID NO: 22902 - RNA, 20 nt, synthetic construct
  source 1..20: mol_type = other RNA
tgttgggaaggtggaagctc

SEQ ID NO: 22903 - RNA, 20 nt, synthetic construct
  source 1..20: mol_type = other RNA
tgtttacatttggtcatcga

SEQ ID NO: 22904 - RNA, 20 nt, synthetic construct
  source 1..20: mol_type = other RNA
tgtttatgcctttctttttg

SEQ ID NO: 22905 - RNA, 20 nt, synthetic construct
  source 1..20: mol_type = other RNA
tgtttccaccccttccattt

SEQ ID NO: 22906 - RNA, 20 nt, synthetic construct
  source 1..20: mol_type = other RNA
ttaaaaatgcagcgcaatct

SEQ ID NO: 22907 - RNA, 20 nt, synthetic construct
  source 1..20: mol_type = other RNA
ttaacacatcactcaagagt

SEQ ID NO: 22908 - RNA, 20 nt, synthetic construct
  source 1..20: mol_type = other RNA
ttaagagcctttctctggag

SEQ ID NO: 22909 - RNA, 20 nt, synthetic construct
  source 1..20: mol_type = other RNA
ttaaggaatgctatgagtgc

SEQ ID NO: 22910 - RNA, 20 nt, synthetic construct
  source 1..20: mol_type = other RNA
ttaatattgccagggtattt

SEQ ID NO: 22911 - RNA, 20 nt, synthetic construct
  source 1..20: mol_type = other RNA
ttaatgtgtcttttcccgat

SEQ ID NO: 22912 - RNA, 20 nt, synthetic construct
  source 1..20: mol_type = other RNA
ttacatttggtcatcgattt

SEQ ID NO: 22913 - RNA, 20 nt, synthetic construct
  source 1..20: mol_type = other RNA
ttactcatgttattgtactc

SEQ ID NO: 22914 - RNA, 20 nt, synthetic construct
  source 1..20: mol_type = other RNA
ttagaaaatcagatgggtgt

SEQ ID NO: 22915 - RNA, 20 nt, synthetic construct
  source 1..20: mol_type = other RNA
ttagccccaagtgaaatacc

SEQ ID NO: 22916 - RNA, 20 nt, synthetic construct
  source 1..20: mol_type = other RNA
ttaggaacctcagataataa

SEQ ID NO: 22917 - RNA, 20 nt, synthetic construct
  source 1..20: mol_type = other RNA
ttatctgaggttcctaagtg

SEQ ID NO: 22918 - RNA, 20 nt, synthetic construct
  source 1..20: mol_type = other RNA
ttatgaactgagaaatgaac

SEQ ID NO: 22919 - RNA, 20 nt, synthetic construct
  source 1..20: mol_type = other RNA
ttatgagggaaagataccaa

SEQ ID NO: 22920 - RNA, 20 nt, synthetic construct
  source 1..20: mol_type = other RNA
ttatgcctttctttttggtt

SEQ ID NO: 22921 - RNA, 20 nt, synthetic construct
  source 1..20: mol_type = other RNA
ttatgtttatgcctttcttt

SEQ ID NO: 22922 - RNA, 20 nt, synthetic construct
  source 1..20: mol_type = other RNA
ttattatctgaggttcctaa

SEQ ID NO: 22923 - RNA, 20 nt, synthetic construct
  source 1..20: mol_type = other RNA
ttattcttcaaaatggaggt

SEQ ID NO: 22924 - RNA, 20 nt, synthetic construct
  source 1..20: mol_type = other RNA
ttattgtactctgtttccac

SEQ ID NO: 22925 - RNA, 20 nt, synthetic construct
  source 1..20: mol_type = other RNA
ttattttttgggatggaatc

SEQ ID NO: 22926 - RNA, 20 nt, synthetic construct
  source 1..20: mol_type = other RNA
ttcaaaatggaggtggcttg

SEQ ID NO: 22927 - RNA, 20 nt, synthetic construct
  source 1..20: mol_type = other RNA
ttcaaagttcatttctcagt

SEQ ID NO: 22928 - RNA, 20 nt, synthetic construct
  source 1..20: mol_type = other RNA
ttcaagtgattcctgggact

SEQ ID NO: 22929 - RNA, 20 nt, synthetic construct
  source 1..20: mol_type = other RNA
ttcacttggggctaacttgg

SEQ ID NO: 22930 - RNA, 20 nt, synthetic construct
  source 1..20: mol_type = other RNA
ttcataatagcccccatcaa

SEQ ID NO: 22931 - RNA, 20 nt, synthetic construct
  source 1..20: mol_type = other RNA
ttcatacagtttagaaaatc

SEQ ID NO: 22932 - RNA, 20 nt, synthetic construct
  source 1..20: mol_type = other RNA
ttcatttctcagttcataat

SEQ ID NO: 22933 - RNA, 20 nt, synthetic construct
  source 1..20: mol_type = other RNA
ttccaccccttccatttttt

SEQ ID NO: 22934 - RNA, 20 nt, synthetic construct
  source 1..20: mol_type = other RNA
ttccaccttcccaacaagcc

SEQ ID NO: 22935 - RNA, 20 nt, synthetic construct
  source 1..20: mol_type = other RNA
ttccactctggccaaatgag

SEQ ID NO: 22936 - RNA, 20 nt, synthetic construct
  source 1..20: mol_type = other RNA
ttccatcccaaaaaataaaa

SEQ ID NO: 22937 - RNA, 20 nt, synthetic construct
  source 1..20: mol_type = other RNA
ttccattgcccaggctggag

SEQ ID NO: 22938 - RNA, 20 nt, synthetic construct
  source 1..20: mol_type = other RNA
ttccatttccactctggcca

SEQ ID NO: 22939 - RNA, 20 nt, synthetic construct
  source 1..20: mol_type = other RNA
ttcccaacaagccacctcca

SEQ ID NO: 22940 - RNA, 20 nt, synthetic construct
  source 1..20: mol_type = other RNA
ttccctcataattcctctat

SEQ ID NO: 22941 - RNA, 20 nt, synthetic construct
  source 1..20: mol_type = other RNA
ttcctaagtggatcaaccca

SEQ ID NO: 22942 - RNA, 20 nt, synthetic construct
  source 1..20: mol_type = other RNA
ttcctctatacatgcctttt

SEQ ID NO: 22943 - RNA, 20 nt, synthetic construct
  source 1..20: mol_type = other RNA
ttcctgctcctgccttgatc

SEQ ID NO: 22944 - RNA, 20 nt, synthetic construct
  source 1..20: mol_type = other RNA
ttccttaacacatcactcaa

SEQ ID NO: 22945 - RNA, 20 nt, synthetic construct
  source 1..20: mol_type = other RNA
ttctaaactgtatgaagtgt

SEQ ID NO: 22946 - RNA, 20 nt, synthetic construct
  source 1..20: mol_type = other RNA
ttctagcagatttctagcag

SEQ ID NO: 22947 - RNA, 20 nt, synthetic construct
  source 1..20: mol_type = other RNA
ttctagcagtatcttctgtc

SEQ ID NO: 22948 - RNA, 20 nt, synthetic construct
  source 1..20: mol_type = other RNA
ttctcagttcataatagccc

SEQ ID NO: 22949 - RNA, 20 nt, synthetic construct
  source 1..20: mol_type = other RNA
ttctcccaattccatttcca

SEQ ID NO: 22950 - RNA, 20 nt, synthetic construct
  source 1..20: mol_type = other RNA
ttctctggaggctctcaagg

SEQ ID NO: 22951 - RNA, 20 nt, synthetic construct
  source 1..20: mol_type = other RNA
ttctgatgccctctcagcac

SEQ ID NO: 22952 - RNA, 20 nt, synthetic construct
  source 1..20: mol_type = other RNA
ttctgtcactggagattgcg

SEQ ID NO: 22953 - RNA, 20 nt, synthetic construct
  source 1..20: mol_type = other RNA
ttcttatgtttatgcctttc

SEQ ID NO: 22954 - RNA, 20 nt, synthetic construct
  source 1..20: mol_type = other RNA
ttcttcaaaatggaggtggc

SEQ ID NO: 22955 - RNA, 20 nt, synthetic construct
  source 1..20: mol_type = other RNA
ttctttttggttcctgctcc

SEQ ID NO: 22956 - RNA, 20 nt, synthetic construct
  source 1..20: mol_type = other RNA
ttgaaaagtatcttggggcc

SEQ ID NO: 22957 - RNA, 20 nt, synthetic construct
  source 1..20: mol_type = other RNA
ttgaactcccaacttcaagt

SEQ ID NO: 22958 - RNA, 20 nt, synthetic construct
  source 1..20: mol_type = other RNA
ttgaagaataaaccgtgact

SEQ ID NO: 22959 - RNA, 20 nt, synthetic construct
  source 1..20: mol_type = other RNA
ttgacaccaagttagcccca

SEQ ID NO: 22960 - RNA, 20 nt, synthetic construct
  source 1..20: mol_type = other RNA
ttgagagcctccagagaaag

SEQ ID NO: 22961 - RNA, 20 nt, synthetic construct
  source 1..20: mol_type = other RNA
ttgagtgatgtgttaaggaa

SEQ ID NO: 22962 - RNA, 20 nt, synthetic construct
  source 1..20: mol_type = other RNA
ttgatccacttaggaacctc

SEQ ID NO: 22963 - RNA, 20 nt, synthetic construct
  source 1..20: mol_type = other RNA
ttgatctacacccatctgat

SEQ ID NO: 22964 - RNA, 20 nt, synthetic construct
  source 1..20: mol_type = other RNA
ttgatgggggctattatgaa

SEQ ID NO: 22965 - RNA, 20 nt, synthetic construct
  source 1..20: mol_type = other RNA
ttgccagggtatttcacttg

SEQ ID NO: 22966 - RNA, 20 nt, synthetic construct
  source 1..20: mol_type = other RNA
ttgcgctgcatttttaagag

SEQ ID NO: 22967 - RNA, 20 nt, synthetic construct
  source 1..20: mol_type = other RNA
ttgctatgtcccaggcactc

SEQ ID NO: 22968 - RNA, 20 nt, synthetic construct
  source 1..20: mol_type = other RNA
ttgctctatacgtggcagat

SEQ ID NO: 22969 - RNA, 20 nt, synthetic construct
  source 1..20: mol_type = other RNA
ttggccagagtggaaatgga

SEQ ID NO: 22970 - RNA, 20 nt, synthetic construct
  source 1..20: mol_type = other RNA
ttggccccaagatacttttc

SEQ ID NO: 22971 - RNA, 20 nt, synthetic construct
  source 1..20: mol_type = other RNA
ttgggaaggtggaagctcat

SEQ ID NO: 22972 - RNA, 20 nt, synthetic construct
  source 1..20: mol_type = other RNA
ttgggagaaatcgatgacca

SEQ ID NO: 22973 - RNA, 20 nt, synthetic construct
  source 1..20: mol_type = other RNA
ttgggatggaatctcattcc

SEQ ID NO: 22974 - RNA, 20 nt, synthetic construct
  source 1..20: mol_type = other RNA
ttggggccaaatcatgtaga

SEQ ID NO: 22975 - RNA, 20 nt, synthetic construct
  source 1..20: mol_type = other RNA
ttggggctaacttggtgtca

SEQ ID NO: 22976 - RNA, 20 nt, synthetic construct
  source 1..20: mol_type = other RNA
ttgggttgatccacttagga

SEQ ID NO: 22977 - RNA, 20 nt, synthetic construct
  source 1..20: mol_type = other RNA
ttggtatctttccctcataa

SEQ ID NO: 22978 - RNA, 20 nt, synthetic construct
  source 1..20: mol_type = other RNA
ttggtcatcgatttctccca

SEQ ID NO: 22979 - RNA, 20 nt, synthetic construct
  source 1..20: mol_type = other RNA
ttggtgcctgatatagcttg

SEQ ID NO: 22980 - RNA, 20 nt, synthetic construct
  source 1..20: mol_type = other RNA
ttggtgtcaagctatatcag

SEQ ID NO: 22981 - RNA, 20 nt, synthetic construct
  source 1..20: mol_type = other RNA
ttggttcctgctcctgcctt

SEQ ID NO: 22982 - RNA, 20 nt, synthetic construct
  source 1..20: mol_type = other RNA
ttgtactctgtttccacccc

SEQ ID NO: 22983 - RNA, 20 nt, synthetic construct
  source 1..20: mol_type = other RNA
ttgttgggaaggtggaagct

SEQ ID NO: 22984 - RNA, 20 nt, synthetic construct
  source 1..20: mol_type = other RNA
tttaagagcctttctctgga

SEQ ID NO: 22985 - RNA, 20 nt, synthetic construct
  source 1..20: mol_type = other RNA
tttacatttggtcatcgatt

SEQ ID NO: 22986 - RNA, 20 nt, synthetic construct
  source 1..20: mol_type = other RNA
tttagaaaatcagatgggtg

SEQ ID NO: 22987 - RNA, 20 nt, synthetic construct
  source 1..20: mol_type = other RNA
tttatgcctttctttttggt

SEQ ID NO: 22988 - RNA, 20 nt, synthetic construct
  source 1..20: mol_type = other RNA
tttattcttcaaaatggagg

SEQ ID NO: 22989 - RNA, 20 nt, synthetic construct
  source 1..20: mol_type = other RNA
tttattttttgggatggaat

SEQ ID NO: 22990 - RNA, 20 nt, synthetic construct
  source 1..20: mol_type = other RNA
tttcaaagttcatttctcag

SEQ ID NO: 22991 - RNA, 20 nt, synthetic construct
  source 1..20: mol_type = other RNA
tttcacttggggctaacttg

SEQ ID NO: 22992 - RNA, 20 nt, synthetic construct
  source 1..20: mol_type = other RNA
tttccaccccttccattttt

SEQ ID NO: 22993 - RNA, 20 nt, synthetic construct
  source 1..20: mol_type = other RNA
tttccactctggccaaatga

SEQ ID NO: 22994 - RNA, 20 nt, synthetic construct
  source 1..20: mol_type = other RNA
tttccctcataattcctcta

SEQ ID NO: 22995 - RNA, 20 nt, synthetic construct
  source 1..20: mol_type = other RNA
tttctaaactgtatgaagtg

SEQ ID NO: 22996 - RNA, 20 nt, synthetic construct
  source 1..20: mol_type = other RNA
tttctagcagatttctagca

SEQ ID NO: 22997 - RNA, 20 nt, synthetic construct
  source 1..20: mol_type = other RNA
tttctagcagtatcttctgt

SEQ ID NO: 22998 - RNA, 20 nt, synthetic construct
  source 1..20: mol_type = other RNA
tttctcagttcataatagcc

SEQ ID NO: 22999 - RNA, 20 nt, synthetic construct
  source 1..20: mol_type = other RNA
tttctcccaattccatttcc

SEQ ID NO: 23000 - RNA, 20 nt, synthetic construct
  source 1..20: mol_type = other RNA
tttctctggaggctctcaag

SEQ ID NO: 23001 - RNA, 20 nt, synthetic construct
  source 1..20: mol_type = other RNA
tttcttatgtttatgccttt

SEQ ID NO: 23002 - RNA, 20 nt, synthetic construct
  source 1..20: mol_type = other RNA
tttctttttggttcctgctc

SEQ ID NO: 23003 - RNA, 20 nt, synthetic construct
  source 1..20: mol_type = other RNA
tttgaaaagtatcttggggc

SEQ ID NO: 23004 - RNA, 20 nt, synthetic construct
  source 1..20: mol_type = other RNA
tttgaagaataaaccgtgac

SEQ ID NO: 23005 - RNA, 20 nt, synthetic construct
  source 1..20: mol_type = other RNA
tttgatgggggctattatga

SEQ ID NO: 23006 - RNA, 20 nt, synthetic construct
  source 1..20: mol_type = other RNA
tttggccagagtggaaatgg

SEQ ID NO: 23007 - RNA, 20 nt, synthetic construct
  source 1..20: mol_type = other RNA
tttggccccaagatactttt

SEQ ID NO: 23008 - RNA, 20 nt, synthetic construct
  source 1..20: mol_type = other RNA
tttgggatggaatctcattc

SEQ ID NO: 23009 - RNA, 20 nt, synthetic construct
  source 1..20: mol_type = other RNA
tttggtcatcgatttctccc

SEQ ID NO: 23010 - RNA, 20 nt, synthetic construct
  source 1..20: mol_type = other RNA
tttggttcctgctcctgcct

SEQ ID NO: 23011 - RNA, 20 nt, synthetic construct
  source 1..20: mol_type = other RNA
ttttaagagcctttctctgg

SEQ ID NO: 23012 - RNA, 20 nt, synthetic construct
  source 1..20: mol_type = other RNA
ttttattttttgggatggaa

SEQ ID NO: 23013 - RNA, 20 nt, synthetic construct
  source 1..20: mol_type = other RNA
ttttcaaagttcatttctca

SEQ ID NO: 23014 - RNA, 20 nt, synthetic construct
  source 1..20: mol_type = other RNA
ttttctaaactgtatgaagt

SEQ ID NO: 23015 - RNA, 20 nt, synthetic construct
  source 1..20: mol_type = other RNA
ttttctagcagatttctagc

SEQ ID NO: 23016 - RNA, 20 nt, synthetic construct
  source 1..20: mol_type = other RNA
ttttcttatgtttatgcctt

SEQ ID NO: 23017 - RNA, 20 nt, synthetic construct
  source 1..20: mol_type = other RNA
ttttgaagaataaaccgtga

SEQ ID NO: 23018 - RNA, 20 nt, synthetic construct
  source 1..20: mol_type = other RNA
ttttgggatggaatctcatt

SEQ ID NO: 23019 - RNA, 20 nt, synthetic construct
  source 1..20: mol_type = other RNA
ttttggttcctgctcctgcc

SEQ ID NO: 23020 - RNA, 20 nt, synthetic construct
  source 1..20: mol_type = other RNA
tttttaagagcctttctctg

SEQ ID NO: 23021 - RNA, 20 nt, synthetic construct
  source 1..20: mol_type = other RNA
tttttattttttgggatgga

SEQ ID NO: 23022 - RNA, 20 nt, synthetic construct
  source 1..20: mol_type = other RNA
tttttctagcagatttctag

SEQ ID NO: 23023 - RNA, 20 nt, synthetic construct
  source 1..20: mol_type = other RNA
tttttcttatgtttatgcct

SEQ ID NO: 23024 - RNA, 20 nt, synthetic construct
  source 1..20: mol_type = other RNA
tttttgggatggaatctcat

SEQ ID NO: 23025 - RNA, 20 nt, synthetic construct
  source 1..20: mol_type = other RNA
tttttggttcctgctcctgc

SEQ ID NO: 23026 - RNA, 20 nt, synthetic construct
  source 1..20: mol_type = other RNA
ttttttattttttgggatgg

SEQ ID NO: 23027 - RNA, 20 nt, synthetic construct
  source 1..20: mol_type = other RNA
ttttttctagcagatttcta

SEQ ID NO: 23028 - RNA, 20 nt, synthetic construct
  source 1..20: mol_type = other RNA
ttttttcttatgtttatgcc

SEQ ID NO: 23029 - RNA, 20 nt, synthetic construct
  source 1..20: mol_type = other RNA
ttttttgggatggaatctca

SEQ ID NO: 23030 - RNA, 21 nt, synthetic construct
  source 1..21: mol_type = other RNA
aaaaaaggcatgtatagagga

SEQ ID NO: 23031 - RNA, 21 nt, synthetic construct
  source 1..21: mol_type = other RNA
aaaaaatggaaggggtggaaa

SEQ ID NO: 23032 - RNA, 21 nt, synthetic construct
  source 1..21: mol_type = other RNA
aaaaaggcatgtatagaggaa

SEQ ID NO: 23033 - RNA, 21 nt, synthetic construct
  source 1..21: mol_type = other RNA
aaaaatgcagcgcaatctcca

SEQ ID NO: 23034 - RNA, 21 nt, synthetic construct
  source 1..21: mol_type = other RNA
aaaaatggaaggggtggaaac

SEQ ID NO: 23035 - RNA, 21 nt, synthetic construct
  source 1..21: mol_type = other RNA
aaaagacacattaatattgcc

SEQ ID NO: 23036 - RNA, 21 nt, synthetic construct
  source 1..21: mol_type = other RNA
aaaaggcatgtatagaggaat

SEQ ID NO: 23037 - RNA, 21 nt, synthetic construct
  source 1..21: mol_type = other RNA
aaaagtatcttggggccaaat

SEQ ID NO: 23038 - RNA, 21 nt, synthetic construct
  source 1..21: mol_type = other RNA
aaaataaagaacataccttgg

SEQ ID NO: 23039 - RNA, 21 nt, synthetic construct
  source 1..21: mol_type = other RNA
aaaatcagatgggtgtagatc

SEQ ID NO: 23040 - RNA, 21 nt, synthetic construct
  source 1..21: mol_type = other RNA
aaaatgcagcgcaatctccag

SEQ ID NO: 23041 - RNA, 21 nt, synthetic construct
  source 1..21: mol_type = other RNA
aaaatggaaggggtggaaaca

SEQ ID NO: 23042 - RNA, 21 nt, synthetic construct
  source 1..21: mol_type = other RNA
aaaatggaggtggcttgttgg

SEQ ID NO: 23043 - RNA, 21 nt, synthetic construct
  source 1..21: mol_type = other RNA
aaacaaaaaaggcatgtatag

SEQ ID NO: 23044 - RNA, 21 nt, synthetic construct
  source 1..21: mol_type = other RNA
aaacacttggtgcctgatata

SEQ ID NO: 23045 - RNA, 21 nt, synthetic construct
  source 1..21: mol_type = other RNA
aaacagagtacaataacatga

SEQ ID NO: 23046 - RNA, 21 nt, synthetic construct
  source 1..21: mol_type = other RNA
aaaccgtgacttggtatcttt

SEQ ID NO: 23047 - RNA, 21 nt, synthetic construct
  source 1..21: mol_type = other RNA
aaactgtatgaagtgtctagt

SEQ ID NO: 23048 - RNA, 21 nt, synthetic construct
  source 1..21: mol_type = other RNA
aaagaaaggcataaacataag

SEQ ID NO: 23049 - RNA, 21 nt, synthetic construct
  source 1..21: mol_type = other RNA
aaagaacataccttgggttga

SEQ ID NO: 23050 - RNA, 21 nt, synthetic construct
  source 1..21: mol_type = other RNA
aaagacacattaatattgcca

SEQ ID NO: 23051 - RNA, 21 nt, synthetic construct
  source 1..21: mol_type = other RNA
aaagataccaagtcacggttt

SEQ ID NO: 23052 - RNA, 21 nt, synthetic construct
  source 1..21: mol_type = other RNA
aaaggcatgtatagaggaatt

SEQ ID NO: 23053 - RNA, 21 nt, synthetic construct
  source 1..21: mol_type = other RNA
aaaggctcttaaaaatgcagc

SEQ ID NO: 23054 - RNA, 21 nt, synthetic construct
  source 1..21: mol_type = other RNA
aaagtatcttggggccaaatc

SEQ ID NO: 23055 - RNA, 21 nt, synthetic construct
  source 1..21: mol_type = other RNA
aaagttcatttctcagttcat

SEQ ID NO: 23056 - RNA, 21 nt, synthetic construct
  source 1..21: mol_type = other RNA
aaataaagaacataccttggg

SEQ ID NO: 23057 - RNA, 21 nt, synthetic construct
  source 1..21: mol_type = other RNA
aaataccctggcaatattaat

SEQ ID NO: 23058 - RNA, 21 nt, synthetic construct
  source 1..21: mol_type = other RNA
aaatcagatgggtgtagatca

SEQ ID NO: 23059 - RNA, 21 nt, synthetic construct
  source 1..21: mol_type = other RNA
aaatcatgtagactcttgagt

SEQ ID NO: 23060 - RNA, 21 nt, synthetic construct
  source 1..21: mol_type = other RNA
aaatcgatgaccaaatgtaaa

SEQ ID NO: 23061 - RNA, 21 nt, synthetic construct
  source 1..21: mol_type = other RNA
aaatgagcttccaccttccca

SEQ ID NO: 23062 - RNA, 21 nt, synthetic construct
  source 1..21: mol_type = other RNA
aaatgcagcgcaatctccagt

SEQ ID NO: 23063 - RNA, 21 nt, synthetic construct
  source 1..21: mol_type = other RNA
aaatggaaggggtggaaacag

SEQ ID NO: 23064 - RNA, 21 nt, synthetic construct
  source 1..21: mol_type = other RNA
aaatggaattgggagaaatcg

SEQ ID NO: 23065 - RNA, 21 nt, synthetic construct
  source 1..21: mol_type = other RNA
aaatggaggtggcttgttggg

SEQ ID NO: 23066 - RNA, 21 nt, synthetic construct
  source 1..21: mol_type = other RNA
aaatgtaaacacttggtgcct

SEQ ID NO: 23067 - RNA, 21 nt, synthetic construct
  source 1..21: mol_type = other RNA
aacaaaaaaggcatgtataga

SEQ ID NO: 23068 - RNA, 21 nt, synthetic construct
  source 1..21: mol_type = other RNA
aacaagccacctccattttga

SEQ ID NO: 23069 - RNA, 21 nt, synthetic construct
  source 1..21: mol_type = other RNA
aacacatcactcaagagtcta

SEQ ID NO: 23070 - RNA, 21 nt, synthetic construct
  source 1..21: mol_type = other RNA
aacacttggtgcctgatatag

SEQ ID NO: 23071 - RNA, 21 nt, synthetic construct
  source 1..21: mol_type = other RNA
aacagagtacaataacatgag

SEQ ID NO: 23072 - RNA, 21 nt, synthetic construct
  source 1..21: mol_type = other RNA
aacataccttgggttgatcca

SEQ ID NO: 23073 - RNA, 21 nt, synthetic construct
  source 1..21: mol_type = other RNA
aacatctgccacgtatagagc

SEQ ID NO: 23074 - RNA, 21 nt, synthetic construct
  source 1..21: mol_type = other RNA
aacatgagtaatttgatgggg

SEQ ID NO: 23075 - RNA, 21 nt, synthetic construct
  source 1..21: mol_type = other RNA
aaccaaaaagaaaggcataaa

SEQ ID NO: 23076 - RNA, 21 nt, synthetic construct
  source 1..21: mol_type = other RNA
aacccaaggtatgttctttat

SEQ ID NO: 23077 - RNA, 21 nt, synthetic construct
  source 1..21: mol_type = other RNA
aaccgtgacttggtatctttc

SEQ ID NO: 23078 - RNA, 21 nt, synthetic construct
  source 1..21: mol_type = other RNA
aacctcagataataacatctg

SEQ ID NO: 23079 - RNA, 21 nt, synthetic construct
  source 1..21: mol_type = other RNA
aactcccaacttcaagtgatc

SEQ ID NO: 23080 - RNA, 21 nt, synthetic construct
  source 1..21: mol_type = other RNA
aactgagaaatgaactttgaa

SEQ ID NO: 23081 - RNA, 21 nt, synthetic construct
  source 1..21: mol_type = other RNA
aactgtatgaagtgtctagta

SEQ ID NO: 23082 - RNA, 21 nt, synthetic construct
  source 1..21: mol_type = other RNA
aacttcaagtgatcagcctgc

SEQ ID NO: 23083 - RNA, 21 nt, synthetic construct
  source 1..21: mol_type = other RNA
aacttggtgtcaagctatatc

SEQ ID NO: 23084 - RNA, 21 nt, synthetic construct
  source 1..21: mol_type = other RNA
aactttgaaaagtatcttggg

SEQ ID NO: 23085 - RNA, 21 nt, synthetic construct
  source 1..21: mol_type = other RNA
aagaaaggcataaacataaga

SEQ ID NO: 23086 - RNA, 21 nt, synthetic construct
  source 1..21: mol_type = other RNA
aagaacataccttgggttgat

SEQ ID NO: 23087 - RNA, 21 nt, synthetic construct
  source 1..21: mol_type = other RNA
aagaataaaccgtgacttggt

SEQ ID NO: 23088 - RNA, 21 nt, synthetic construct
  source 1..21: mol_type = other RNA
aagacacattaatattgccag

SEQ ID NO: 23089 - RNA, 21 nt, synthetic construct
  source 1..21: mol_type = other RNA
aagagcctttctctggaggct

SEQ ID NO: 23090 - RNA, 21 nt, synthetic construct
  source 1..21: mol_type = other RNA
aagagtctacatgatttggcc

SEQ ID NO: 23091 - RNA, 21 nt, synthetic construct
  source 1..21: mol_type = other RNA
aagataccaagtcacggttta

SEQ ID NO: 23092 - RNA, 21 nt, synthetic construct
  source 1..21: mol_type = other RNA
aagatactgctagaaatctgc

SEQ ID NO: 23093 - RNA, 21 nt, synthetic construct
  source 1..21: mol_type = other RNA
aagccacctccattttgaaga

SEQ ID NO: 23094 - RNA, 21 nt, synthetic construct
  source 1..21: mol_type = other RNA
aagctatatcaggcaccaagt

SEQ ID NO: 23095 - RNA, 21 nt, synthetic construct
  source 1..21: mol_type = other RNA
aagctcatttggccagagtgg

SEQ ID NO: 23096 - RNA, 21 nt, synthetic construct
  source 1..21: mol_type = other RNA
aaggaatgctatgagtgctga

SEQ ID NO: 23097 - RNA, 21 nt, synthetic construct
  source 1..21: mol_type = other RNA
aaggacttctgatgccctctc

SEQ ID NO: 23098 - RNA, 21 nt, synthetic construct
  source 1..21: mol_type = other RNA
aaggcaggagcaggaaccaaa

SEQ ID NO: 23099 - RNA, 21 nt, synthetic construct
  source 1..21: mol_type = other RNA
aaggcaggctgatcacttgaa

SEQ ID NO: 23100 - RNA, 21 nt, synthetic construct
  source 1..21: mol_type = other RNA
aaggcatgtatagaggaatta

SEQ ID NO: 23101 - RNA, 21 nt, synthetic construct
  source 1..21: mol_type = other RNA
aaggctcttaaaaatgcagcg

SEQ ID NO: 23102 - RNA, 21 nt, synthetic construct
  source 1..21: mol_type = other RNA
aaggggtggaaacagagtaca

SEQ ID NO: 23103 - RNA, 21 nt, synthetic construct
  source 1..21: mol_type = other RNA
aaggtggaagctcatttggcc

SEQ ID NO: 23104 - RNA, 21 nt, synthetic construct
  source 1..21: mol_type = other RNA
aagtatcttggggccaaatca

SEQ ID NO: 23105 - RNA, 21 nt, synthetic construct
  source 1..21: mol_type = other RNA
aagtcacggtttattcttcaa

SEQ ID NO: 23106 - RNA, 21 nt, synthetic construct
  source 1..21: mol_type = other RNA
aagtccttgagagcctccaga

SEQ ID NO: 23107 - RNA, 21 nt, synthetic construct
  source 1..21: mol_type = other RNA
aagtgaaataccctggcaata

SEQ ID NO: 23108 - RNA, 21 nt, synthetic construct
  source 1..21: mol_type = other RNA
aagtgattcctgggactacag

SEQ ID NO: 23109 - RNA, 21 nt, synthetic construct
  source 1..21: mol_type = other RNA
aagtggatcaacccaaggtat

SEQ ID NO: 23110 - RNA, 21 nt, synthetic construct
  source 1..21: mol_type = other RNA
aagtgtctagtagagtgcctg

SEQ ID NO: 23111 - RNA, 21 nt, synthetic construct
  source 1..21: mol_type = other RNA
aagtgtttacatttggtcatc

SEQ ID NO: 23112 - RNA, 21 nt, synthetic construct
  source 1..21: mol_type = other RNA
aagttagccccaagtgaaata

SEQ ID NO: 23113 - RNA, 21 nt, synthetic construct
  source 1..21: mol_type = other RNA
aagttcatttctcagttcata

SEQ ID NO: 23114 - RNA, 21 nt, synthetic construct
  source 1..21: mol_type = other RNA
aataaaccgtgacttggtatc

SEQ ID NO: 23115 - RNA, 21 nt, synthetic construct
  source 1..21: mol_type = other RNA
aataaagaacataccttgggt

SEQ ID NO: 23116 - RNA, 21 nt, synthetic construct
  source 1..21: mol_type = other RNA
aataacatctgccacgtatag

SEQ ID NO: 23117 - RNA, 21 nt, synthetic construct
  source 1..21: mol_type = other RNA
aataccctggcaatattaatg

SEQ ID NO: 23118 - RNA, 21 nt, synthetic construct
  source 1..21: mol_type = other RNA
aatagcccccatcaaattact

SEQ ID NO: 23119 - RNA, 21 nt, synthetic construct
  source 1..21: mol_type = other RNA
aatatcgggaaaagacacatt

SEQ ID NO: 23120 - RNA, 21 nt, synthetic construct
  source 1..21: mol_type = other RNA
aatattaatgtgtcttttccc

SEQ ID NO: 23121 - RNA, 21 nt, synthetic construct
  source 1..21: mol_type = other RNA
aatattgccagggtatttcac

SEQ ID NO: 23122 - RNA, 21 nt, synthetic construct
  source 1..21: mol_type = other RNA
aatcagatgggtgtagatcaa

SEQ ID NO: 23123 - RNA, 21 nt, synthetic construct
  source 1..21: mol_type = other RNA
aatcatgtagactcttgagtg

SEQ ID NO: 23124 - RNA, 21 nt, synthetic construct
  source 1..21: mol_type = other RNA
aatcgatgaccaaatgtaaac

SEQ ID NO: 23125 - RNA, 21 nt, synthetic construct
  source 1..21: mol_type = other RNA
aatctcattccattgcccagg

SEQ ID NO: 23126 - RNA, 21 nt, synthetic construct
  source 1..21: mol_type = other RNA
aatctccagtgacagaagata

SEQ ID NO: 23127 - RNA, 21 nt, synthetic construct
  source 1..21: mol_type = other RNA
aatgagattccatcccaaaaa

SEQ ID NO: 23128 - RNA, 21 nt, synthetic construct
  source 1..21: mol_type = other RNA
aatgagcttccaccttcccaa

SEQ ID NO: 23129 - RNA, 21 nt, synthetic construct
  source 1..21: mol_type = other RNA
aatgcagcgcaatctccagtg

SEQ ID NO: 23130 - RNA, 21 nt, synthetic construct
  source 1..21: mol_type = other RNA
aatgctatgagtgctgagagg

SEQ ID NO: 23131 - RNA, 21 nt, synthetic construct
  source 1..21: mol_type = other RNA
aatggaaggggtggaaacaga

SEQ ID NO: 23132 - RNA, 21 nt, synthetic construct
  source 1..21: mol_type = other RNA
aatggaatgagattccatccc

SEQ ID NO: 23133 - RNA, 21 nt, synthetic construct
  source 1..21: mol_type = other RNA
aatggaattgggagaaatcga

SEQ ID NO: 23134 - RNA, 21 nt, synthetic construct
  source 1..21: mol_type = other RNA
aatggaggtggcttgttggga

SEQ ID NO: 23135 - RNA, 21 nt, synthetic construct
  source 1..21: mol_type = other RNA
aatgtaaacacttggtgcctg

SEQ ID NO: 23136 - RNA, 21 nt, synthetic construct
  source 1..21: mol_type = other RNA
aattatgagggaaagatacca

SEQ ID NO: 23137 - RNA, 21 nt, synthetic construct
  source 1..21: mol_type = other RNA
aattccatttccactctggcc

SEQ ID NO: 23138 - RNA, 21 nt, synthetic construct
  source 1..21: mol_type = other RNA
aattcctctatacatgccttt

SEQ ID NO: 23139 - RNA, 21 nt, synthetic construct
  source 1..21: mol_type = other RNA
aattgctatgtcccaggcact

SEQ ID NO: 23140 - RNA, 21 nt, synthetic construct
  source 1..21: mol_type = other RNA
aattgctctatacgtggcaga

SEQ ID NO: 23141 - RNA, 21 nt, synthetic construct
  source 1..21: mol_type = other RNA
aattgggagaaatcgatgacc

SEQ ID NO: 23142 - RNA, 21 nt, synthetic construct
  source 1..21: mol_type = other RNA
aatttgatgggggctattatg

SEQ ID NO: 23143 - RNA, 21 nt, synthetic construct
  source 1..21: mol_type = other RNA
acaaaaaaggcatgtatagag

SEQ ID NO: 23144 - RNA, 21 nt, synthetic construct
  source 1..21: mol_type = other RNA
acaagccacctccattttgaa

SEQ ID NO: 23145 - RNA, 21 nt, synthetic construct
  source 1..21: mol_type = other RNA
acacatcactcaagagtctac

SEQ ID NO: 23146 - RNA, 21 nt, synthetic construct
  source 1..21: mol_type = other RNA
acacattaatattgccagggt

SEQ ID NO: 23147 - RNA, 21 nt, synthetic construct
  source 1..21: mol_type = other RNA
acaccaagttagccccaagtg

SEQ ID NO: 23148 - RNA, 21 nt, synthetic construct
  source 1..21: mol_type = other RNA
acacccatctgattttctaaa

SEQ ID NO: 23149 - RNA, 21 nt, synthetic construct
  source 1..21: mol_type = other RNA
acactgcactccagcctgggc

SEQ ID NO: 23150 - RNA, 21 nt, synthetic construct
  source 1..21: mol_type = other RNA
acacttcatacagtttagaaa

SEQ ID NO: 23151 - RNA, 21 nt, synthetic construct
  source 1..21: mol_type = other RNA
acacttggtgcctgatatagc

SEQ ID NO: 23152 - RNA, 21 nt, synthetic construct
  source 1..21: mol_type = other RNA
acagaagatactgctagaaat

SEQ ID NO: 23153 - RNA, 21 nt, synthetic construct
  source 1..21: mol_type = other RNA
acagagtacaataacatgagt

SEQ ID NO: 23154 - RNA, 21 nt, synthetic construct
  source 1..21: mol_type = other RNA
acagtttagaaaatcagatgg

SEQ ID NO: 23155 - RNA, 21 nt, synthetic construct
  source 1..21: mol_type = other RNA
acataccttgggttgatccac

SEQ ID NO: 23156 - RNA, 21 nt, synthetic construct
  source 1..21: mol_type = other RNA
acatagcaattgctctatacg

SEQ ID NO: 23157 - RNA, 21 nt, synthetic construct
  source 1..21: mol_type = other RNA
acatcactcaagagtctacat

SEQ ID NO: 23158 - RNA, 21 nt, synthetic construct
  source 1..21: mol_type = other RNA
acatctgccacgtatagagca

SEQ ID NO: 23159 - RNA, 21 nt, synthetic construct
  source 1..21: mol_type = other RNA
acatgagtaatttgatggggg

SEQ ID NO: 23160 - RNA, 21 nt, synthetic construct
  source 1..21: mol_type = other RNA
acatgatttggccccaagata

SEQ ID NO: 23161 - RNA, 21 nt, synthetic construct
  source 1..21: mol_type = other RNA
acattaatattgccagggtat

SEQ ID NO: 23162 - RNA, 21 nt, synthetic construct
  source 1..21: mol_type = other RNA
acatttggtcatcgatttctc

SEQ ID NO: 23163 - RNA, 21 nt, synthetic construct
  source 1..21: mol_type = other RNA
accaaaaagaaaggcataaac

SEQ ID NO: 23164 - RNA, 21 nt, synthetic construct
  source 1..21: mol_type = other RNA
accaaatgtaaacacttggtg

SEQ ID NO: 23165 - RNA, 21 nt, synthetic construct
  source 1..21: mol_type = other RNA
accaagtcacggtttattctt

SEQ ID NO: 23166 - RNA, 21 nt, synthetic construct
  source 1..21: mol_type = other RNA
accaagtgtttacatttggtc

SEQ ID NO: 23167 - RNA, 21 nt, synthetic construct
  source 1..21: mol_type = other RNA
accaagttagccccaagtgaa

SEQ ID NO: 23168 - RNA, 21 nt, synthetic construct
  source 1..21: mol_type = other RNA
acccaaggtatgttctttatt

SEQ ID NO: 23169 - RNA, 21 nt, synthetic construct
  source 1..21: mol_type = other RNA
acccatctgattttctaaact

SEQ ID NO: 23170 - RNA, 21 nt, synthetic construct
  source 1..21: mol_type = other RNA
accctggcaatattaatgtgt

SEQ ID NO: 23171 - RNA, 21 nt, synthetic construct
  source 1..21: mol_type = other RNA
accgtgacttggtatctttcc

SEQ ID NO: 23172 - RNA, 21 nt, synthetic construct
  source 1..21: mol_type = other RNA
acctcagataataacatctgc

SEQ ID NO: 23173 - RNA, 21 nt, synthetic construct
  source 1..21: mol_type = other RNA
acctccattttgaagaataaa

SEQ ID NO: 23174 - RNA, 21 nt, synthetic construct
  source 1..21: mol_type = other RNA
accttcccaacaagccacctc

SEQ ID NO: 23175 - RNA, 21 nt, synthetic construct
  source 1..21: mol_type = other RNA
accttgggttgatccacttag

SEQ ID NO: 23176 - RNA, 21 nt, synthetic construct
  source 1..21: mol_type = other RNA
acggtttattcttcaaaatgg

SEQ ID NO: 23177 - RNA, 21 nt, synthetic construct
  source 1..21: mol_type = other RNA
acgtatagagcaattgctatg

SEQ ID NO: 23178 - RNA, 21 nt, synthetic construct
  source 1..21: mol_type = other RNA
acgtggcagatgttattatct

SEQ ID NO: 23179 - RNA, 21 nt, synthetic construct
  source 1..21: mol_type = other RNA
actagacacttcatacagttt

SEQ ID NO: 23180 - RNA, 21 nt, synthetic construct
  source 1..21: mol_type = other RNA
actcaagagtctacatgattt

SEQ ID NO: 23181 - RNA, 21 nt, synthetic construct
  source 1..21: mol_type = other RNA
actcatagcattccttaacac

SEQ ID NO: 23182 - RNA, 21 nt, synthetic construct
  source 1..21: mol_type = other RNA
actcatgttattgtactctgt

SEQ ID NO: 23183 - RNA, 21 nt, synthetic construct
  source 1..21: mol_type = other RNA
actccagcctgggcaatggaa

SEQ ID NO: 23184 - RNA, 21 nt, synthetic construct
  source 1..21: mol_type = other RNA
actcccaacttcaagtgatca

SEQ ID NO: 23185 - RNA, 21 nt, synthetic construct
  source 1..21: mol_type = other RNA
actctactagacacttcatac

SEQ ID NO: 23186 - RNA, 21 nt, synthetic construct
  source 1..21: mol_type = other RNA
actctggccaaatgagcttcc

SEQ ID NO: 23187 - RNA, 21 nt, synthetic construct
  source 1..21: mol_type = other RNA
actctgtttccaccccttcca

SEQ ID NO: 23188 - RNA, 21 nt, synthetic construct
  source 1..21: mol_type = other RNA
actcttgagtgatgtgttaag

SEQ ID NO: 23189 - RNA, 21 nt, synthetic construct
  source 1..21: mol_type = other RNA
actgagaaatgaactttgaaa

SEQ ID NO: 23190 - RNA, 21 nt, synthetic construct
  source 1..21: mol_type = other RNA
actgcacactgcactccagcc

SEQ ID NO: 23191 - RNA, 21 nt, synthetic construct
  source 1..21: mol_type = other RNA
actgctagaaatctgctagaa

SEQ ID NO: 23192 - RNA, 21 nt, synthetic construct
  source 1..21: mol_type = other RNA
actggagattgcgctgcattt

SEQ ID NO: 23193 - RNA, 21 nt, synthetic construct
  source 1..21: mol_type = other RNA
actgtatgaagtgtctagtag

SEQ ID NO: 23194 - RNA, 21 nt, synthetic construct
  source 1..21: mol_type = other RNA
acttaggaacctcagataata

SEQ ID NO: 23195 - RNA, 21 nt, synthetic construct
  source 1..21: mol_type = other RNA
acttcaagtgatcagcctgcc

SEQ ID NO: 23196 - RNA, 21 nt, synthetic construct
  source 1..21: mol_type = other RNA
acttctgatgccctctcagca

SEQ ID NO: 23197 - RNA, 21 nt, synthetic construct
  source 1..21: mol_type = other RNA
acttggggctaacttggtgtc

SEQ ID NO: 23198 - RNA, 21 nt, synthetic construct
  source 1..21: mol_type = other RNA
acttggtatctttccctcata

SEQ ID NO: 23199 - RNA, 21 nt, synthetic construct
  source 1..21: mol_type = other RNA
acttggtgcctgatatagctt

SEQ ID NO: 23200 - RNA, 21 nt, synthetic construct
  source 1..21: mol_type = other RNA
acttggtgtcaagctatatca

SEQ ID NO: 23201 - RNA, 21 nt, synthetic construct
  source 1..21: mol_type = other RNA
actttgaaaagtatcttgggg

SEQ ID NO: 23202 - RNA, 21 nt, synthetic construct
  source 1..21: mol_type = other RNA
acttttcaaagttcatttctc

SEQ ID NO: 23203 - RNA, 21 nt, synthetic construct
  source 1..21: mol_type = other RNA
agaaaatcagatgggtgtaga

SEQ ID NO: 23204 - RNA, 21 nt, synthetic construct
  source 1..21: mol_type = other RNA
agaaaggcataaacataagaa

SEQ ID NO: 23205 - RNA, 21 nt, synthetic construct
  source 1..21: mol_type = other RNA
agaaaggctcttaaaaatgca

SEQ ID NO: 23206 - RNA, 21 nt, synthetic construct
  source 1..21: mol_type = other RNA
agaaatcgatgaccaaatgta

SEQ ID NO: 23207 - RNA, 21 nt, synthetic construct
  source 1..21: mol_type = other RNA
agaacataccttgggttgatc

SEQ ID NO: 23208 - RNA, 21 nt, synthetic construct
  source 1..21: mol_type = other RNA
agaagatactgctagaaatct

SEQ ID NO: 23209 - RNA, 21 nt, synthetic construct
  source 1..21: mol_type = other RNA
agaagtccttgagagcctcca

SEQ ID NO: 23210 - RNA, 21 nt, synthetic construct
  source 1..21: mol_type = other RNA
agaataaaccgtgacttggta

SEQ ID NO: 23211 - RNA, 21 nt, synthetic construct
  source 1..21: mol_type = other RNA
agacacattaatattgccagg

SEQ ID NO: 23212 - RNA, 21 nt, synthetic construct
  source 1..21: mol_type = other RNA
agacacttcatacagtttaga

SEQ ID NO: 23213 - RNA, 21 nt, synthetic construct
  source 1..21: mol_type = other RNA
agactcttgagtgatgtgtta

SEQ ID NO: 23214 - RNA, 21 nt, synthetic construct
  source 1..21: mol_type = other RNA
agagaaaggctcttaaaaatg

SEQ ID NO: 23215 - RNA, 21 nt, synthetic construct
  source 1..21: mol_type = other RNA
agagcaattgctatgtcccag

SEQ ID NO: 23216 - RNA, 21 nt, synthetic construct
  source 1..21: mol_type = other RNA
agagcctccagagaaaggctc

SEQ ID NO: 23217 - RNA, 21 nt, synthetic construct
  source 1..21: mol_type = other RNA
agagcctttctctggaggctc

SEQ ID NO: 23218 - RNA, 21 nt, synthetic construct
  source 1..21: mol_type = other RNA
agaggaattatgagggaaaga

SEQ ID NO: 23219 - RNA, 21 nt, synthetic construct
  source 1..21: mol_type = other RNA
agagggcatcagaagtccttg

SEQ ID NO: 23220 - RNA, 21 nt, synthetic construct
  source 1..21: mol_type = other RNA
agagtacaataacatgagtaa

SEQ ID NO: 23221 - RNA, 21 nt, synthetic construct
  source 1..21: mol_type = other RNA
agagtctacatgatttggccc

SEQ ID NO: 23222 - RNA, 21 nt, synthetic construct
  source 1..21: mol_type = other RNA
agagtgcctgggacatagcaa

SEQ ID NO: 23223 - RNA, 21 nt, synthetic construct
  source 1..21: mol_type = other RNA
agagtggaaatggaattggga

SEQ ID NO: 23224 - RNA, 21 nt, synthetic construct
  source 1..21: mol_type = other RNA
agataataacatctgccacgt

SEQ ID NO: 23225 - RNA, 21 nt, synthetic construct
  source 1..21: mol_type = other RNA
agataccaagtcacggtttat

SEQ ID NO: 23226 - RNA, 21 nt, synthetic construct
  source 1..21: mol_type = other RNA
agatactgctagaaatctgct

SEQ ID NO: 23227 - RNA, 21 nt, synthetic construct
  source 1..21: mol_type = other RNA
agatcaaggcaggagcaggaa

SEQ ID NO: 23228 - RNA, 21 nt, synthetic construct
  source 1..21: mol_type = other RNA
agatctcaccactgcacactg

SEQ ID NO: 23229 - RNA, 21 nt, synthetic construct
  source 1..21: mol_type = other RNA
agatgggtgtagatcaaggca

SEQ ID NO: 23230 - RNA, 21 nt, synthetic construct
  source 1..21: mol_type = other RNA
agatgttattatctgaggttc

SEQ ID NO: 23231 - RNA, 21 nt, synthetic construct
  source 1..21: mol_type = other RNA
agattccatcccaaaaaataa

SEQ ID NO: 23232 - RNA, 21 nt, synthetic construct
  source 1..21: mol_type = other RNA
agattgcgctgcatttttaag

SEQ ID NO: 23233 - RNA, 21 nt, synthetic construct
  source 1..21: mol_type = other RNA
agatttctagcagtatcttct

SEQ ID NO: 23234 - RNA, 21 nt, synthetic construct
  source 1..21: mol_type = other RNA
agcaattgctatgtcccaggc

SEQ ID NO: 23235 - RNA, 21 nt, synthetic construct
  source 1..21: mol_type = other RNA
agcaattgctctatacgtggc

SEQ ID NO: 23236 - RNA, 21 nt, synthetic construct
  source 1..21: mol_type = other RNA
agcactcatagcattccttaa

SEQ ID NO: 23237 - RNA, 21 nt, synthetic construct
  source 1..21: mol_type = other RNA
agcagatttctagcagtatct

SEQ ID NO: 23238 - RNA, 21 nt, synthetic construct
  source 1..21: mol_type = other RNA
agcaggaaccaaaaagaaagg

SEQ ID NO: 23239 - RNA, 21 nt, synthetic construct
  source 1..21: mol_type = other RNA
agcagtatcttctgtcactgg

SEQ ID NO: 23240 - RNA, 21 nt, synthetic construct
  source 1..21: mol_type = other RNA
agcattccttaacacatcact

SEQ ID NO: 23241 - RNA, 21 nt, synthetic construct
  source 1..21: mol_type = other RNA
agccacctccattttgaagaa

SEQ ID NO: 23242 - RNA, 21 nt, synthetic construct
  source 1..21: mol_type = other RNA
agccccaagtgaaataccctg

SEQ ID NO: 23243 - RNA, 21 nt, synthetic construct
  source 1..21: mol_type = other RNA
agcccccatcaaattactcat

SEQ ID NO: 23244 - RNA, 21 nt, synthetic construct
  source 1..21: mol_type = other RNA
agcctccagagaaaggctctt

SEQ ID NO: 23245 - RNA, 21 nt, synthetic construct
  source 1..21: mol_type = other RNA
agcctgggcaatggaatgaga

SEQ ID NO: 23246 - RNA, 21 nt, synthetic construct
  source 1..21: mol_type = other RNA
agcctttctctggaggctctc

SEQ ID NO: 23247 - RNA, 21 nt, synthetic construct
  source 1..21: mol_type = other RNA
agcgcaatctccagtgacaga

SEQ ID NO: 23248 - RNA, 21 nt, synthetic construct
  source 1..21: mol_type = other RNA
agctatatcaggcaccaagtg

SEQ ID NO: 23249 - RNA, 21 nt, synthetic construct
  source 1..21: mol_type = other RNA
agctcatttggccagagtgga

SEQ ID NO: 23250 - RNA, 21 nt, synthetic construct
  source 1..21: mol_type = other RNA
agctgagatctcaccactgca

SEQ ID NO: 23251 - RNA, 21 nt, synthetic construct
  source 1..21: mol_type = other RNA
agcttccaccttcccaacaag

SEQ ID NO: 23252 - RNA, 21 nt, synthetic construct
  source 1..21: mol_type = other RNA
agcttgacaccaagttagccc

SEQ ID NO: 23253 - RNA, 21 nt, synthetic construct
  source 1..21: mol_type = other RNA
aggaaccaaaaagaaaggcat

SEQ ID NO: 23254 - RNA, 21 nt, synthetic construct
  source 1..21: mol_type = other RNA
aggaacctcagataataacat

SEQ ID NO: 23255 - RNA, 21 nt, synthetic construct
  source 1..21: mol_type = other RNA
aggaatatcgggaaaagacac

SEQ ID NO: 23256 - RNA, 21 nt, synthetic construct
  source 1..21: mol_type = other RNA
aggaatgctatgagtgctgag

SEQ ID NO: 23257 - RNA, 21 nt, synthetic construct
  source 1..21: mol_type = other RNA
aggaattatgagggaaagata

SEQ ID NO: 23258 - RNA, 21 nt, synthetic construct
  source 1..21: mol_type = other RNA
aggacttctgatgccctctca

SEQ ID NO: 23259 - RNA, 21 nt, synthetic construct
  source 1..21: mol_type = other RNA
aggagcaggaaccaaaaagaa

SEQ ID NO: 23260 - RNA, 21 nt, synthetic construct
  source 1..21: mol_type = other RNA
aggcaccaagtgtttacattt

SEQ ID NO: 23261 - RNA, 21 nt, synthetic construct
  source 1..21: mol_type = other RNA
aggcactctactagacacttc

SEQ ID NO: 23262 - RNA, 21 nt, synthetic construct
  source 1..21: mol_type = other RNA
aggcaggagcaggaaccaaaa

SEQ ID NO: 23263 - RNA, 21 nt, synthetic construct
  source 1..21: mol_type = other RNA
aggcaggctgatcacttgaag

SEQ ID NO: 23264 - RNA, 21 nt, synthetic construct
  source 1..21: mol_type = other RNA
aggcatgtatagaggaattat

SEQ ID NO: 23265 - RNA, 21 nt, synthetic construct
  source 1..21: mol_type = other RNA
aggccaaggcaggctgatcac

SEQ ID NO: 23266 - RNA, 21 nt, synthetic construct
  source 1..21: mol_type = other RNA
aggctctcaaggacttctgat

SEQ ID NO: 23267 - RNA, 21 nt, synthetic construct
  source 1..21: mol_type = other RNA
aggctcttaaaaatgcagcgc

SEQ ID NO: 23268 - RNA, 21 nt, synthetic construct
  source 1..21: mol_type = other RNA
aggctgatcacttgaagttgg

SEQ ID NO: 23269 - RNA, 21 nt, synthetic construct
  source 1..21: mol_type = other RNA
aggctggagtgcagtgtgcag

SEQ ID NO: 23270 - RNA, 21 nt, synthetic construct
  source 1..21: mol_type = other RNA
agggaaagataccaagtcacg

SEQ ID NO: 23271 - RNA, 21 nt, synthetic construct
  source 1..21: mol_type = other RNA
agggcatcagaagtccttgag

SEQ ID NO: 23272 - RNA, 21 nt, synthetic construct
  source 1..21: mol_type = other RNA
aggggtggaaacagagtacaa

SEQ ID NO: 23273 - RNA, 21 nt, synthetic construct
  source 1..21: mol_type = other RNA
agggtatttcacttggggcta

SEQ ID NO: 23274 - RNA, 21 nt, synthetic construct
  source 1..21: mol_type = other RNA
aggtggaagctcatttggcca

SEQ ID NO: 23275 - RNA, 21 nt, synthetic construct
  source 1..21: mol_type = other RNA
aggtggcttgttgggaaggtg

SEQ ID NO: 23276 - RNA, 21 nt, synthetic construct
  source 1..21: mol_type = other RNA
aggttcctaagtggatcaacc

SEQ ID NO: 23277 - RNA, 21 nt, synthetic construct
  source 1..21: mol_type = other RNA
agtaatttgatgggggctatt

SEQ ID NO: 23278 - RNA, 21 nt, synthetic construct
  source 1..21: mol_type = other RNA
agtagagtgcctgggacatag

SEQ ID NO: 23279 - RNA, 21 nt, synthetic construct
  source 1..21: mol_type = other RNA
agtatcttctgtcactggaga

SEQ ID NO: 23280 - RNA, 21 nt, synthetic construct
  source 1..21: mol_type = other RNA
agtatcttggggccaaatcat

SEQ ID NO: 23281 - RNA, 21 nt, synthetic construct
  source 1..21: mol_type = other RNA
agtcacggtttattcttcaaa

SEQ ID NO: 23282 - RNA, 21 nt, synthetic construct
  source 1..21: mol_type = other RNA
agtcccaggaatcacttgaac

SEQ ID NO: 23283 - RNA, 21 nt, synthetic construct
  source 1..21: mol_type = other RNA
agtccttgagagcctccagag

SEQ ID NO: 23284 - RNA, 21 nt, synthetic construct
  source 1..21: mol_type = other RNA
agtctacatgatttggcccca

SEQ ID NO: 23285 - RNA, 21 nt, synthetic construct
  source 1..21: mol_type = other RNA
agtgaaataccctggcaatat

SEQ ID NO: 23286 - RNA, 21 nt, synthetic construct
  source 1..21: mol_type = other RNA
agtgacagaagatactgctag

SEQ ID NO: 23287 - RNA, 21 nt, synthetic construct
  source 1..21: mol_type = other RNA
agtgagctgagatctcaccac

SEQ ID NO: 23288 - RNA, 21 nt, synthetic construct
  source 1..21: mol_type = other RNA
agtgatgtgttaaggaatgct

SEQ ID NO: 23289 - RNA, 21 nt, synthetic construct
  source 1..21: mol_type = other RNA
agtgattcctgggactacagg

SEQ ID NO: 23290 - RNA, 21 nt, synthetic construct
  source 1..21: mol_type = other RNA
agtgcagtgtgcagtggtgag

SEQ ID NO: 23291 - RNA, 21 nt, synthetic construct
  source 1..21: mol_type = other RNA
agtgcctgggacatagcaatt

SEQ ID NO: 23292 - RNA, 21 nt, synthetic construct
  source 1..21: mol_type = other RNA
agtgctgagagggcatcagaa

SEQ ID NO: 23293 - RNA, 21 nt, synthetic construct
  source 1..21: mol_type = other RNA
agtggaaatggaattgggaga

SEQ ID NO: 23294 - RNA, 21 nt, synthetic construct
  source 1..21: mol_type = other RNA
agtggatcaacccaaggtatg

SEQ ID NO: 23295 - RNA, 21 nt, synthetic construct
  source 1..21: mol_type = other RNA
agtgtctagtagagtgcctgg

SEQ ID NO: 23296 - RNA, 21 nt, synthetic construct
  source 1..21: mol_type = other RNA
agtgtgcagtggtgagatctc

SEQ ID NO: 23297 - RNA, 21 nt, synthetic construct
  source 1..21: mol_type = other RNA
agtgtttacatttggtcatcg

SEQ ID NO: 23298 - RNA, 21 nt, synthetic construct
  source 1..21: mol_type = other RNA
agttagccccaagtgaaatac

SEQ ID NO: 23299 - RNA, 21 nt, synthetic construct
  source 1..21: mol_type = other RNA
agttcataatagcccccatca

SEQ ID NO: 23300 - RNA, 21 nt, synthetic construct
  source 1..21: mol_type = other RNA
agttcatttctcagttcataa

SEQ ID NO: 23301 - RNA, 21 nt, synthetic construct
  source 1..21: mol_type = other RNA
agtttagaaaatcagatgggt

SEQ ID NO: 23302 - RNA, 21 nt, synthetic construct
  source 1..21: mol_type = other RNA
ataaaccgtgacttggtatct

SEQ ID NO: 23303 - RNA, 21 nt, synthetic construct
  source 1..21: mol_type = other RNA
ataaagaacataccttgggtt

SEQ ID NO: 23304 - RNA, 21 nt, synthetic construct
  source 1..21: mol_type = other RNA
ataacatctgccacgtataga

SEQ ID NO: 23305 - RNA, 21 nt, synthetic construct
  source 1..21: mol_type = other RNA
ataacatgagtaatttgatgg

SEQ ID NO: 23306 - RNA, 21 nt, synthetic construct
  source 1..21: mol_type = other RNA
ataataacatctgccacgtat

SEQ ID NO: 23307 - RNA, 21 nt, synthetic construct
  source 1..21: mol_type = other RNA
ataatagcccccatcaaatta

SEQ ID NO: 23308 - RNA, 21 nt, synthetic construct
  source 1..21: mol_type = other RNA
ataattcctctatacatgcct

SEQ ID NO: 23309 - RNA, 21 nt, synthetic construct
  source 1..21: mol_type = other RNA
ataccaagtcacggtttattc

SEQ ID NO: 23310 - RNA, 21 nt, synthetic construct
  source 1..21: mol_type = other RNA
ataccctggcaatattaatgt

SEQ ID NO: 23311 - RNA, 21 nt, synthetic construct
  source 1..21: mol_type = other RNA
ataccttgggttgatccactt

SEQ ID NO: 23312 - RNA, 21 nt, synthetic construct
  source 1..21: mol_type = other RNA
atacgtggcagatgttattat

SEQ ID NO: 23313 - RNA, 21 nt, synthetic construct
  source 1..21: mol_type = other RNA
atactgctagaaatctgctag

SEQ ID NO: 23314 - RNA, 21 nt, synthetic construct
  source 1..21: mol_type = other RNA
atagagcaattgctatgtccc

SEQ ID NO: 23315 - RNA, 21 nt, synthetic construct
  source 1..21: mol_type = other RNA
atagaggaattatgagggaaa

SEQ ID NO: 23316 - RNA, 21 nt, synthetic construct
  source 1..21: mol_type = other RNA
atagcaattgctctatacgtg

SEQ ID NO: 23317 - RNA, 21 nt, synthetic construct
  source 1..21: mol_type = other RNA
atagcattccttaacacatca

SEQ ID NO: 23318 - RNA, 21 nt, synthetic construct
  source 1..21: mol_type = other RNA
atagcccccatcaaattactc

SEQ ID NO: 23319 - RNA, 21 nt, synthetic construct
  source 1..21: mol_type = other RNA
atagcttgacaccaagttagc

SEQ ID NO: 23320 - RNA, 21 nt, synthetic construct
  source 1..21: mol_type = other RNA
atatagcttgacaccaagtta

SEQ ID NO: 23321 - RNA, 21 nt, synthetic construct
  source 1..21: mol_type = other RNA
atatcaggcaccaagtgttta

SEQ ID NO: 23322 - RNA, 21 nt, synthetic construct
  source 1..21: mol_type = other RNA
atatcgggaaaagacacatta

SEQ ID NO: 23323 - RNA, 21 nt, synthetic construct
  source 1..21: mol_type = other RNA
atattaatgtgtcttttcccg

SEQ ID NO: 23324 - RNA, 21 nt, synthetic construct
  source 1..21: mol_type = other RNA
atattgccagggtatttcact

SEQ ID NO: 23325 - RNA, 21 nt, synthetic construct
  source 1..21: mol_type = other RNA
atcaacccaaggtatgttctt

SEQ ID NO: 23326 - RNA, 21 nt, synthetic construct
  source 1..21: mol_type = other RNA
atcaaggcaggagcaggaacc

SEQ ID NO: 23327 - RNA, 21 nt, synthetic construct
  source 1..21: mol_type = other RNA
atcactcaagagtctacatga

SEQ ID NO: 23328 - RNA, 21 nt, synthetic construct
  source 1..21: mol_type = other RNA
atcagaagtccttgagagcct

SEQ ID NO: 23329 - RNA, 21 nt, synthetic construct
  source 1..21: mol_type = other RNA
atcagatgggtgtagatcaag

SEQ ID NO: 23330 - RNA, 21 nt, synthetic construct
  source 1..21: mol_type = other RNA
atcaggcaccaagtgtttaca

SEQ ID NO: 23331 - RNA, 21 nt, synthetic construct
  source 1..21: mol_type = other RNA
atcatgtagactcttgagtga

SEQ ID NO: 23332 - RNA, 21 nt, synthetic construct
  source 1..21: mol_type = other RNA
atccacttaggaacctcagat

SEQ ID NO: 23333 - RNA, 21 nt, synthetic construct
  source 1..21: mol_type = other RNA
atcgatgaccaaatgtaaaca

SEQ ID NO: 23334 - RNA, 21 nt, synthetic construct
  source 1..21: mol_type = other RNA
atcgatttctcccaattccat

SEQ ID NO: 23335 - RNA, 21 nt, synthetic construct
  source 1..21: mol_type = other RNA
atcgggaaaagacacattaat

SEQ ID NO: 23336 - RNA, 21 nt, synthetic construct
  source 1..21: mol_type = other RNA
atctacacccatctgattttc

SEQ ID NO: 23337 - RNA, 21 nt, synthetic construct
  source 1..21: mol_type = other RNA
atctcaccactgcacactgca

SEQ ID NO: 23338 - RNA, 21 nt, synthetic construct
  source 1..21: mol_type = other RNA
atctccagtgacagaagatac

SEQ ID NO: 23339 - RNA, 21 nt, synthetic construct
  source 1..21: mol_type = other RNA
atctgaggttcctaagtggat

SEQ ID NO: 23340 - RNA, 21 nt, synthetic construct
  source 1..21: mol_type = other RNA
atctgccacgtatagagcaat

SEQ ID NO: 23341 - RNA, 21 nt, synthetic construct
  source 1..21: mol_type = other RNA
atcttctgtcactggagattg

SEQ ID NO: 23342 - RNA, 21 nt, synthetic construct
  source 1..21: mol_type = other RNA
atcttggggccaaatcatgta

SEQ ID NO: 23343 - RNA, 21 nt, synthetic construct
  source 1..21: mol_type = other RNA
atctttccctcataattcctc

SEQ ID NO: 23344 - RNA, 21 nt, synthetic construct
  source 1..21: mol_type = other RNA
atgaactgagaaatgaacttt

SEQ ID NO: 23345 - RNA, 21 nt, synthetic construct
  source 1..21: mol_type = other RNA
atgaagtgtctagtagagtgc

SEQ ID NO: 23346 - RNA, 21 nt, synthetic construct
  source 1..21: mol_type = other RNA
atgaccaaatgtaaacacttg

SEQ ID NO: 23347 - RNA, 21 nt, synthetic construct
  source 1..21: mol_type = other RNA
atgagattccatcccaaaaaa

SEQ ID NO: 23348 - RNA, 21 nt, synthetic construct
  source 1..21: mol_type = other RNA
atgagcttccaccttcccaac

SEQ ID NO: 23349 - RNA, 21 nt, synthetic construct
  source 1..21: mol_type = other RNA
atgagggaaagataccaagtc

SEQ ID NO: 23350 - RNA, 21 nt, synthetic construct
  source 1..21: mol_type = other RNA
atgagtaatttgatgggggct

SEQ ID NO: 23351 - RNA, 21 nt, synthetic construct
  source 1..21: mol_type = other RNA
atgagtgctgagagggcatca

SEQ ID NO: 23352 - RNA, 21 nt, synthetic construct
  source 1..21: mol_type = other RNA
atgatttggccccaagatact

SEQ ID NO: 23353 - RNA, 21 nt, synthetic construct
  source 1..21: mol_type = other RNA
atgcagcgcaatctccagtga

SEQ ID NO: 23354 - RNA, 21 nt, synthetic construct
  source 1..21: mol_type = other RNA
atgccctctcagcactcatag

SEQ ID NO: 23355 - RNA, 21 nt, synthetic construct
  source 1..21: mol_type = other RNA
atgcctttctttttggttcct

SEQ ID NO: 23356 - RNA, 21 nt, synthetic construct
  source 1..21: mol_type = other RNA
atgctatgagtgctgagaggg

SEQ ID NO: 23357 - RNA, 21 nt, synthetic construct
  source 1..21: mol_type = other RNA
atggaaggggtggaaacagag

SEQ ID NO: 23358 - RNA, 21 nt, synthetic construct
  source 1..21: mol_type = other RNA
atggaatctcattccattgcc

SEQ ID NO: 23359 - RNA, 21 nt, synthetic construct
  source 1..21: mol_type = other RNA
atggaatgagattccatccca

SEQ ID NO: 23360 - RNA, 21 nt, synthetic construct
  source 1..21: mol_type = other RNA
atggaattgggagaaatcgat

SEQ ID NO: 23361 - RNA, 21 nt, synthetic construct
  source 1..21: mol_type = other RNA
atggaggtggcttgttgggaa

SEQ ID NO: 23362 - RNA, 21 nt, synthetic construct
  source 1..21: mol_type = other RNA
atgggggctattatgaactga

SEQ ID NO: 23363 - RNA, 21 nt, synthetic construct
  source 1..21: mol_type = other RNA
atgggtgtagatcaaggcagg

SEQ ID NO: 23364 - RNA, 21 nt, synthetic construct
  source 1..21: mol_type = other RNA
atggtggtgtgtgcctgtagt

SEQ ID NO: 23365 - RNA, 21 nt, synthetic construct
  source 1..21: mol_type = other RNA
atgtaaacacttggtgcctga

SEQ ID NO: 23366 - RNA, 21 nt, synthetic construct
  source 1..21: mol_type = other RNA
atgtagactcttgagtgatgt

SEQ ID NO: 23367 - RNA, 21 nt, synthetic construct
  source 1..21: mol_type = other RNA
atgtatagaggaattatgagg

SEQ ID NO: 23368 - RNA, 21 nt, synthetic construct
  source 1..21: mol_type = other RNA
atgtcccaggcactctactag

SEQ ID NO: 23369 - RNA, 21 nt, synthetic construct
  source 1..21: mol_type = other RNA
atgtgttaaggaatgctatga

SEQ ID NO: 23370 - RNA, 21 nt, synthetic construct
  source 1..21: mol_type = other RNA
atgttattatctgaggttcct

SEQ ID NO: 23371 - RNA, 21 nt, synthetic construct
  source 1..21: mol_type = other RNA
atgttattgtactctgtttcc

SEQ ID NO: 23372 - RNA, 21 nt, synthetic construct
  source 1..21: mol_type = other RNA
atgtttatgcctttctttttg

SEQ ID NO: 23373 - RNA, 21 nt, synthetic construct
  source 1..21: mol_type = other RNA
attaatattgccagggtattt

SEQ ID NO: 23374 - RNA, 21 nt, synthetic construct
  source 1..21: mol_type = other RNA
attaatgtgtcttttcccgat

SEQ ID NO: 23375 - RNA, 21 nt, synthetic construct
  source 1..21: mol_type = other RNA
attactcatgttattgtactc

SEQ ID NO: 23376 - RNA, 21 nt, synthetic construct
  source 1..21: mol_type = other RNA
attatctgaggttcctaagtg

SEQ ID NO: 23377 - RNA, 21 nt, synthetic construct
  source 1..21: mol_type = other RNA
attatgaactgagaaatgaac

SEQ ID NO: 23378 - RNA, 21 nt, synthetic construct
  source 1..21: mol_type = other RNA
attatgagggaaagataccaa

SEQ ID NO: 23379 - RNA, 21 nt, synthetic construct
  source 1..21: mol_type = other RNA
attccattgcccaggctggag

SEQ ID NO: 23380 - RNA, 21 nt, synthetic construct
  source 1..21: mol_type = other RNA
attccatttccactctggcca

SEQ ID NO: 23381 - RNA, 21 nt, synthetic construct
  source 1..21: mol_type = other RNA
attcctctatacatgcctttt

SEQ ID NO: 23382 - RNA, 21 nt, synthetic construct
  source 1..21: mol_type = other RNA
attcctgggactacaggcaca

SEQ ID NO: 23383 - RNA, 21 nt, synthetic construct
  source 1..21: mol_type = other RNA
attccttaacacatcactcaa

SEQ ID NO: 23384 - RNA, 21 nt, synthetic construct
  source 1..21: mol_type = other RNA
attcttcaaaatggaggtggc

SEQ ID NO: 23385 - RNA, 21 nt, synthetic construct
  source 1..21: mol_type = other RNA
attgccagggtatttcacttg

SEQ ID NO: 23386 - RNA, 21 nt, synthetic construct
  source 1..21: mol_type = other RNA
attgcccaggctggagtgcag

SEQ ID NO: 23387 - RNA, 21 nt, synthetic construct
  source 1..21: mol_type = other RNA
attgcgctgcatttttaagag

SEQ ID NO: 23388 - RNA, 21 nt, synthetic construct
  source 1..21: mol_type = other RNA
attgctatgtcccaggcactc

SEQ ID NO: 23389 - RNA, 21 nt, synthetic construct
  source 1..21: mol_type = other RNA
attgctctatacgtggcagat

SEQ ID NO: 23390 - RNA, 21 nt, synthetic construct
  source 1..21: mol_type = other RNA
attgggagaaatcgatgacca

SEQ ID NO: 23391 - RNA, 21 nt, synthetic construct
  source 1..21: mol_type = other RNA
attgtactctgtttccacccc

SEQ ID NO: 23392 - RNA, 21 nt, synthetic construct
  source 1..21: mol_type = other RNA
atttcacttggggctaacttg

SEQ ID NO: 23393 - RNA, 21 nt, synthetic construct
  source 1..21: mol_type = other RNA
atttccactctggccaaatga

SEQ ID NO: 23394 - RNA, 21 nt, synthetic construct
  source 1..21: mol_type = other RNA
atttctagcagtatcttctgt

SEQ ID NO: 23395 - RNA, 21 nt, synthetic construct
  source 1..21: mol_type = other RNA
atttctcagttcataatagcc

SEQ ID NO: 23396 - RNA, 21 nt, synthetic construct
  source 1..21: mol_type = other RNA
atttctcccaattccatttcc

SEQ ID NO: 23397 - RNA, 21 nt, synthetic construct
  source 1..21: mol_type = other RNA
atttgatgggggctattatga

SEQ ID NO: 23398 - RNA, 21 nt, synthetic construct
  source 1..21: mol_type = other RNA
atttggccagagtggaaatgg

SEQ ID NO: 23399 - RNA, 21 nt, synthetic construct
  source 1..21: mol_type = other RNA
atttggccccaagatactttt

SEQ ID NO: 23400 - RNA, 21 nt, synthetic construct
  source 1..21: mol_type = other RNA
atttggtcatcgatttctccc

SEQ ID NO: 23401 - RNA, 21 nt, synthetic construct
  source 1..21: mol_type = other RNA
attttgaagaataaaccgtga

SEQ ID NO: 23402 - RNA, 21 nt, synthetic construct
  source 1..21: mol_type = other RNA
atttttaagagcctttctctg

SEQ ID NO: 23403 - RNA, 21 nt, synthetic construct
  source 1..21: mol_type = other RNA
attttttgggatggaatctca

SEQ ID NO: 23404 - RNA, 21 nt, synthetic construct
  source 1..21: mol_type = other RNA
caaaaaaggcatgtatagagg

SEQ ID NO: 23405 - RNA, 21 nt, synthetic construct
  source 1..21: mol_type = other RNA
caaaaagaaaggcataaacat

SEQ ID NO: 23406 - RNA, 21 nt, synthetic construct
  source 1..21: mol_type = other RNA
caaaatggaggtggcttgttg

SEQ ID NO: 23407 - RNA, 21 nt, synthetic construct
  source 1..21: mol_type = other RNA
caaagttcatttctcagttca

SEQ ID NO: 23408 - RNA, 21 nt, synthetic construct
  source 1..21: mol_type = other RNA
caaatcatgtagactcttgag

SEQ ID NO: 23409 - RNA, 21 nt, synthetic construct
  source 1..21: mol_type = other RNA
caaatgagcttccaccttccc

SEQ ID NO: 23410 - RNA, 21 nt, synthetic construct
  source 1..21: mol_type = other RNA
caaatgtaaacacttggtgcc

SEQ ID NO: 23411 - RNA, 21 nt, synthetic construct
  source 1..21: mol_type = other RNA
caacaagccacctccattttg

SEQ ID NO: 23412 - RNA, 21 nt, synthetic construct
  source 1..21: mol_type = other RNA
caacccaaggtatgttcttta

SEQ ID NO: 23413 - RNA, 21 nt, synthetic construct
  source 1..21: mol_type = other RNA
caacttcaagtgatcagcctg

SEQ ID NO: 23414 - RNA, 21 nt, synthetic construct
  source 1..21: mol_type = other RNA
caagagtctacatgatttggc

SEQ ID NO: 23415 - RNA, 21 nt, synthetic construct
  source 1..21: mol_type = other RNA
caagatacttttcaaagttca

SEQ ID NO: 23416 - RNA, 21 nt, synthetic construct
  source 1..21: mol_type = other RNA
caagccacctccattttgaag

SEQ ID NO: 23417 - RNA, 21 nt, synthetic construct
  source 1..21: mol_type = other RNA
caagctatatcaggcaccaag

SEQ ID NO: 23418 - RNA, 21 nt, synthetic construct
  source 1..21: mol_type = other RNA
caaggacttctgatgccctct

SEQ ID NO: 23419 - RNA, 21 nt, synthetic construct
  source 1..21: mol_type = other RNA
caaggcaggagcaggaaccaa

SEQ ID NO: 23420 - RNA, 21 nt, synthetic construct
  source 1..21: mol_type = other RNA
caaggcaggctgatcacttga

SEQ ID NO: 23421 - RNA, 21 nt, synthetic construct
  source 1..21: mol_type = other RNA
caagtcacggtttattcttca

SEQ ID NO: 23422 - RNA, 21 nt, synthetic construct
  source 1..21: mol_type = other RNA
caagtgaaataccctggcaat

SEQ ID NO: 23423 - RNA, 21 nt, synthetic construct
  source 1..21: mol_type = other RNA
caagtgattcctgggactaca

SEQ ID NO: 23424 - RNA, 21 nt, synthetic construct
  source 1..21: mol_type = other RNA
caagtgtttacatttggtcat

SEQ ID NO: 23425 - RNA, 21 nt, synthetic construct
  source 1..21: mol_type = other RNA
caagttagccccaagtgaaat

SEQ ID NO: 23426 - RNA, 21 nt, synthetic construct
  source 1..21: mol_type = other RNA
caatattaatgtgtcttttcc

SEQ ID NO: 23427 - RNA, 21 nt, synthetic construct
  source 1..21: mol_type = other RNA
caatctccagtgacagaagat

SEQ ID NO: 23428 - RNA, 21 nt, synthetic construct
  source 1..21: mol_type = other RNA
caatggaatgagattccatcc

SEQ ID NO: 23429 - RNA, 21 nt, synthetic construct
  source 1..21: mol_type = other RNA
caattccatttccactctggc

SEQ ID NO: 23430 - RNA, 21 nt, synthetic construct
  source 1..21: mol_type = other RNA
caattgctatgtcccaggcac

SEQ ID NO: 23431 - RNA, 21 nt, synthetic construct
  source 1..21: mol_type = other RNA
caattgctctatacgtggcag

SEQ ID NO: 23432 - RNA, 21 nt, synthetic construct
  source 1..21: mol_type = other RNA
cacactgcactccagcctggg

SEQ ID NO: 23433 - RNA, 21 nt, synthetic construct
  source 1..21: mol_type = other RNA
cacatcactcaagagtctaca

SEQ ID NO: 23434 - RNA, 21 nt, synthetic construct
  source 1..21: mol_type = other RNA
cacattaatattgccagggta

SEQ ID NO: 23435 - RNA, 21 nt, synthetic construct
  source 1..21: mol_type = other RNA
caccaagtgtttacatttggt

SEQ ID NO: 23436 - RNA, 21 nt, synthetic construct
  source 1..21: mol_type = other RNA
caccaagttagccccaagtga

SEQ ID NO: 23437 - RNA, 21 nt, synthetic construct
  source 1..21: mol_type = other RNA
cacccatctgattttctaaac

SEQ ID NO: 23438 - RNA, 21 nt, synthetic construct
  source 1..21: mol_type = other RNA
cacctccattttgaagaataa

SEQ ID NO: 23439 - RNA, 21 nt, synthetic construct
  source 1..21: mol_type = other RNA
caccttcccaacaagccacct

SEQ ID NO: 23440 - RNA, 21 nt, synthetic construct
  source 1..21: mol_type = other RNA
cacggtttattcttcaaaatg

SEQ ID NO: 23441 - RNA, 21 nt, synthetic construct
  source 1..21: mol_type = other RNA
cacgtatagagcaattgctat

SEQ ID NO: 23442 - RNA, 21 nt, synthetic construct
  source 1..21: mol_type = other RNA
cactcaagagtctacatgatt

SEQ ID NO: 23443 - RNA, 21 nt, synthetic construct
  source 1..21: mol_type = other RNA
cactcatagcattccttaaca

SEQ ID NO: 23444 - RNA, 21 nt, synthetic construct
  source 1..21: mol_type = other RNA
cactccagcctgggcaatgga

SEQ ID NO: 23445 - RNA, 21 nt, synthetic construct
  source 1..21: mol_type = other RNA
cactctactagacacttcata

SEQ ID NO: 23446 - RNA, 21 nt, synthetic construct
  source 1..21: mol_type = other RNA
cactctggccaaatgagcttc

SEQ ID NO: 23447 - RNA, 21 nt, synthetic construct
  source 1..21: mol_type = other RNA
cactggagattgcgctgcatt

SEQ ID NO: 23448 - RNA, 21 nt, synthetic construct
  source 1..21: mol_type = other RNA
cacttaggaacctcagataat

SEQ ID NO: 23449 - RNA, 21 nt, synthetic construct
  source 1..21: mol_type = other RNA
cacttcatacagtttagaaaa

SEQ ID NO: 23450 - RNA, 21 nt, synthetic construct
  source 1..21: mol_type = other RNA
cacttggggctaacttggtgt

SEQ ID NO: 23451 - RNA, 21 nt, synthetic construct
  source 1..21: mol_type = other RNA
cacttggtgcctgatatagct

SEQ ID NO: 23452 - RNA, 21 nt, synthetic construct
  source 1..21: mol_type = other RNA
cagaagatactgctagaaatc

SEQ ID NO: 23453 - RNA, 21 nt, synthetic construct
  source 1..21: mol_type = other RNA
cagaagtccttgagagcctcc

SEQ ID NO: 23454 - RNA, 21 nt, synthetic construct
  source 1..21: mol_type = other RNA
cagagaaaggctcttaaaaat

SEQ ID NO: 23455 - RNA, 21 nt, synthetic construct
  source 1..21: mol_type = other RNA
cagagtacaataacatgagta

SEQ ID NO: 23456 - RNA, 21 nt, synthetic construct
  source 1..21: mol_type = other RNA
cagagtggaaatggaattggg

SEQ ID NO: 23457 - RNA, 21 nt, synthetic construct
  source 1..21: mol_type = other RNA
cagataataacatctgccacg

SEQ ID NO: 23458 - RNA, 21 nt, synthetic construct
  source 1..21: mol_type = other RNA
cagatgggtgtagatcaaggc

SEQ ID NO: 23459 - RNA, 21 nt, synthetic construct
  source 1..21: mol_type = other RNA
cagatgttattatctgaggtt

SEQ ID NO: 23460 - RNA, 21 nt, synthetic construct
  source 1..21: mol_type = other RNA
cagatttctagcagtatcttc

SEQ ID NO: 23461 - RNA, 21 nt, synthetic construct
  source 1..21: mol_type = other RNA
cagcactcatagcattcctta

SEQ ID NO: 23462 - RNA, 21 nt, synthetic construct
  source 1..21: mol_type = other RNA
cagcctgggcaatggaatgag

SEQ ID NO: 23463 - RNA, 21 nt, synthetic construct
  source 1..21: mol_type = other RNA
cagcgcaatctccagtgacag

SEQ ID NO: 23464 - RNA, 21 nt, synthetic construct
  source 1..21: mol_type = other RNA
caggaaccaaaaagaaaggca

SEQ ID NO: 23465 - RNA, 21 nt, synthetic construct
  source 1..21: mol_type = other RNA
caggagcaggaaccaaaaaga

SEQ ID NO: 23466 - RNA, 21 nt, synthetic construct
  source 1..21: mol_type = other RNA
caggcaccaagtgtttacatt

SEQ ID NO: 23467 - RNA, 21 nt, synthetic construct
  source 1..21: mol_type = other RNA
caggcactctactagacactt

SEQ ID NO: 23468 - RNA, 21 nt, synthetic construct
  source 1..21: mol_type = other RNA
caggctgatcacttgaagttg

SEQ ID NO: 23469 - RNA, 21 nt, synthetic construct
  source 1..21: mol_type = other RNA
caggctggagtgcagtgtgca

SEQ ID NO: 23470 - RNA, 21 nt, synthetic construct
  source 1..21: mol_type = other RNA
cagggtatttcacttggggct

SEQ ID NO: 23471 - RNA, 21 nt, synthetic construct
  source 1..21: mol_type = other RNA
cagtatcttctgtcactggag

SEQ ID NO: 23472 - RNA, 21 nt, synthetic construct
  source 1..21: mol_type = other RNA
cagtgacagaagatactgcta

SEQ ID NO: 23473 - RNA, 21 nt, synthetic construct
  source 1..21: mol_type = other RNA
cagtgagctgagatctcacca

SEQ ID NO: 23474 - RNA, 21 nt, synthetic construct
  source 1..21: mol_type = other RNA
cagtgtgcagtggtgagatct

SEQ ID NO: 23475 - RNA, 21 nt, synthetic construct
  source 1..21: mol_type = other RNA
cagttcataatagcccccatc

SEQ ID NO: 23476 - RNA, 21 nt, synthetic construct
  source 1..21: mol_type = other RNA
cagtttagaaaatcagatggg

SEQ ID NO: 23477 - RNA, 21 nt, synthetic construct
  source 1..21: mol_type = other RNA
cataatagcccccatcaaatt

SEQ ID NO: 23478 - RNA, 21 nt, synthetic construct
  source 1..21: mol_type = other RNA
cataattcctctatacatgcc

SEQ ID NO: 23479 - RNA, 21 nt, synthetic construct
  source 1..21: mol_type = other RNA
catacagtttagaaaatcaga

SEQ ID NO: 23480 - RNA, 21 nt, synthetic construct
  source 1..21: mol_type = other RNA
cataccttgggttgatccact

SEQ ID NO: 23481 - RNA, 21 nt, synthetic construct
  source 1..21: mol_type = other RNA
catagcaattgctctatacgt

SEQ ID NO: 23482 - RNA, 21 nt, synthetic construct
  source 1..21: mol_type = other RNA
catagcattccttaacacatc

SEQ ID NO: 23483 - RNA, 21 nt, synthetic construct
  source 1..21: mol_type = other RNA
catcactcaagagtctacatg

SEQ ID NO: 23484 - RNA, 21 nt, synthetic construct
  source 1..21: mol_type = other RNA
catcagaagtccttgagagcc

SEQ ID NO: 23485 - RNA, 21 nt, synthetic construct
  source 1..21: mol_type = other RNA
catcgatttctcccaattcca

SEQ ID NO: 23486 - RNA, 21 nt, synthetic construct
  source 1..21: mol_type = other RNA
catctgattttctaaactgta

SEQ ID NO: 23487 - RNA, 21 nt, synthetic construct
  source 1..21: mol_type = other RNA
catctgccacgtatagagcaa

SEQ ID NO: 23488 - RNA, 21 nt, synthetic construct
  source 1..21: mol_type = other RNA
catgagtaatttgatgggggc

SEQ ID NO: 23489 - RNA, 21 nt, synthetic construct
  source 1..21: mol_type = other RNA
catgatttggccccaagatac

SEQ ID NO: 23490 - RNA, 21 nt, synthetic construct
  source 1..21: mol_type = other RNA
catgtagactcttgagtgatg

SEQ ID NO: 23491 - RNA, 21 nt, synthetic construct
  source 1..21: mol_type = other RNA
catgtatagaggaattatgag

SEQ ID NO: 23492 - RNA, 21 nt, synthetic construct
  source 1..21: mol_type = other RNA
catgttattgtactctgtttc

SEQ ID NO: 23493 - RNA, 21 nt, synthetic construct
  source 1..21: mol_type = other RNA
cattaatattgccagggtatt

SEQ ID NO: 23494 - RNA, 21 nt, synthetic construct
  source 1..21: mol_type = other RNA
cattccttaacacatcactca

SEQ ID NO: 23495 - RNA, 21 nt, synthetic construct
  source 1..21: mol_type = other RNA
cattgcccaggctggagtgca

SEQ ID NO: 23496 - RNA, 21 nt, synthetic construct
  source 1..21: mol_type = other RNA
catttccactctggccaaatg

SEQ ID NO: 23497 - RNA, 21 nt, synthetic construct
  source 1..21: mol_type = other RNA
catttctcagttcataatagc

SEQ ID NO: 23498 - RNA, 21 nt, synthetic construct
  source 1..21: mol_type = other RNA
catttggccagagtggaaatg

SEQ ID NO: 23499 - RNA, 21 nt, synthetic construct
  source 1..21: mol_type = other RNA
catttggtcatcgatttctcc

SEQ ID NO: 23500 - RNA, 21 nt, synthetic construct
  source 1..21: mol_type = other RNA
cattttgaagaataaaccgtg

SEQ ID NO: 23501 - RNA, 21 nt, synthetic construct
  source 1..21: mol_type = other RNA
catttttaagagcctttctct

SEQ ID NO: 23502 - RNA, 21 nt, synthetic construct
  source 1..21: mol_type = other RNA
ccaaaaagaaaggcataaaca

SEQ ID NO: 23503 - RNA, 21 nt, synthetic construct
  source 1..21: mol_type = other RNA
ccaaatcatgtagactcttga

SEQ ID NO: 23504 - RNA, 21 nt, synthetic construct
  source 1..21: mol_type = other RNA
ccaaatgagcttccaccttcc

SEQ ID NO: 23505 - RNA, 21 nt, synthetic construct
  source 1..21: mol_type = other RNA
ccaaatgtaaacacttggtgc

SEQ ID NO: 23506 - RNA, 21 nt, synthetic construct
  source 1..21: mol_type = other RNA
ccaacaagccacctccatttt

SEQ ID NO: 23507 - RNA, 21 nt, synthetic construct
  source 1..21: mol_type = other RNA
ccaacttcaagtgatcagcct

SEQ ID NO: 23508 - RNA, 21 nt, synthetic construct
  source 1..21: mol_type = other RNA
ccaagatacttttcaaagttc

SEQ ID NO: 23509 - RNA, 21 nt, synthetic construct
  source 1..21: mol_type = other RNA
ccaaggcaggctgatcacttg

SEQ ID NO: 23510 - RNA, 21 nt, synthetic construct
  source 1..21: mol_type = other RNA
ccaaggtatgttctttatttt

SEQ ID NO: 23511 - RNA, 21 nt, synthetic construct
  source 1..21: mol_type = other RNA
ccaagtcacggtttattcttc

SEQ ID NO: 23512 - RNA, 21 nt, synthetic construct
  source 1..21: mol_type = other RNA
ccaagtgaaataccctggcaa

SEQ ID NO: 23513 - RNA, 21 nt, synthetic construct
  source 1..21: mol_type = other RNA
ccaagtgtttacatttggtca

SEQ ID NO: 23514 - RNA, 21 nt, synthetic construct
  source 1..21: mol_type = other RNA
ccaagttagccccaagtgaaa

SEQ ID NO: 23515 - RNA, 21 nt, synthetic construct
  source 1..21: mol_type = other RNA
ccaattccatttccactctgg

SEQ ID NO: 23516 - RNA, 21 nt, synthetic construct
  source 1..21: mol_type = other RNA
ccacctccattttgaagaata

SEQ ID NO: 23517 - RNA, 21 nt, synthetic construct
  source 1..21: mol_type = other RNA
ccaccttcccaacaagccacc

SEQ ID NO: 23518 - RNA, 21 nt, synthetic construct
  source 1..21: mol_type = other RNA
ccacgtatagagcaattgcta

SEQ ID NO: 23519 - RNA, 21 nt, synthetic construct
  source 1..21: mol_type = other RNA
ccactctggccaaatgagctt

SEQ ID NO: 23520 - RNA, 21 nt, synthetic construct
  source 1..21: mol_type = other RNA
ccacttaggaacctcagataa

SEQ ID NO: 23521 - RNA, 21 nt, synthetic construct
  source 1..21: mol_type = other RNA
ccagagaaaggctcttaaaaa

SEQ ID NO: 23522 - RNA, 21 nt, synthetic construct
  source 1..21: mol_type = other RNA
ccagagtggaaatggaattgg

SEQ ID NO: 23523 - RNA, 21 nt, synthetic construct
  source 1..21: mol_type = other RNA
ccagcctgggcaatggaatga

SEQ ID NO: 23524 - RNA, 21 nt, synthetic construct
  source 1..21: mol_type = other RNA
ccaggcactctactagacact

SEQ ID NO: 23525 - RNA, 21 nt, synthetic construct
  source 1..21: mol_type = other RNA
ccaggctggagtgcagtgtgc

SEQ ID NO: 23526 - RNA, 21 nt, synthetic construct
  source 1..21: mol_type = other RNA
ccagggtatttcacttggggc

SEQ ID NO: 23527 - RNA, 21 nt, synthetic construct
  source 1..21: mol_type = other RNA
ccagtgacagaagatactgct

SEQ ID NO: 23528 - RNA, 21 nt, synthetic construct
  source 1..21: mol_type = other RNA
ccatcaaattactcatgttat

SEQ ID NO: 23529 - RNA, 21 nt, synthetic construct
  source 1..21: mol_type = other RNA
ccatctgattttctaaactgt

SEQ ID NO: 23530 - RNA, 21 nt, synthetic construct
  source 1..21: mol_type = other RNA
ccattgcccaggctggagtgc

SEQ ID NO: 23531 - RNA, 21 nt, synthetic construct
  source 1..21: mol_type = other RNA
ccatttccactctggccaaat

SEQ ID NO: 23532 - RNA, 21 nt, synthetic construct
  source 1..21: mol_type = other RNA
ccattttgaagaataaaccgt

SEQ ID NO: 23533 - RNA, 21 nt, synthetic construct
  source 1..21: mol_type = other RNA
cccaacaagccacctccattt

SEQ ID NO: 23534 - RNA, 21 nt, synthetic construct
  source 1..21: mol_type = other RNA
cccaacttcaagtgatcagcc

SEQ ID NO: 23535 - RNA, 21 nt, synthetic construct
  source 1..21: mol_type = other RNA
cccaagatacttttcaaagtt

SEQ ID NO: 23536 - RNA, 21 nt, synthetic construct
  source 1..21: mol_type = other RNA
cccaaggtatgttctttattt

SEQ ID NO: 23537 - RNA, 21 nt, synthetic construct
  source 1..21: mol_type = other RNA
cccaagtgaaataccctggca

SEQ ID NO: 23538 - RNA, 21 nt, synthetic construct
  source 1..21: mol_type = other RNA
cccaattccatttccactctg

SEQ ID NO: 23539 - RNA, 21 nt, synthetic construct
  source 1..21: mol_type = other RNA
cccaggaatcacttgaaccca

SEQ ID NO: 23540 - RNA, 21 nt, synthetic construct
  source 1..21: mol_type = other RNA
cccaggcactctactagacac

SEQ ID NO: 23541 - RNA, 21 nt, synthetic construct
  source 1..21: mol_type = other RNA
cccatcaaattactcatgtta

SEQ ID NO: 23542 - RNA, 21 nt, synthetic construct
  source 1..21: mol_type = other RNA
cccatctgattttctaaactg

SEQ ID NO: 23543 - RNA, 21 nt, synthetic construct
  source 1..21: mol_type = other RNA
ccccaagatacttttcaaagt

SEQ ID NO: 23544 - RNA, 21 nt, synthetic construct
  source 1..21: mol_type = other RNA
ccccaagtgaaataccctggc

SEQ ID NO: 23545 - RNA, 21 nt, synthetic construct
  source 1..21: mol_type = other RNA
ccccatcaaattactcatgtt

SEQ ID NO: 23546 - RNA, 21 nt, synthetic construct
  source 1..21: mol_type = other RNA
cccccatcaaattactcatgt

SEQ ID NO: 23547 - RNA, 21 nt, synthetic construct
  source 1..21: mol_type = other RNA
ccctcataattcctctataca

SEQ ID NO: 23548 - RNA, 21 nt, synthetic construct
  source 1..21: mol_type = other RNA
ccctctcagcactcatagcat

SEQ ID NO: 23549 - RNA, 21 nt, synthetic construct
  source 1..21: mol_type = other RNA
ccctggcaatattaatgtgtc

SEQ ID NO: 23550 - RNA, 21 nt, synthetic construct
  source 1..21: mol_type = other RNA
ccgcctcctgggttcaagtga

SEQ ID NO: 23551 - RNA, 21 nt, synthetic construct
  source 1..21: mol_type = other RNA
ccgtgacttggtatctttccc

SEQ ID NO: 23552 - RNA, 21 nt, synthetic construct
  source 1..21: mol_type = other RNA
cctaagtggatcaacccaagg

SEQ ID NO: 23553 - RNA, 21 nt, synthetic construct
  source 1..21: mol_type = other RNA
cctcagataataacatctgcc

SEQ ID NO: 23554 - RNA, 21 nt, synthetic construct
  source 1..21: mol_type = other RNA
cctcataattcctctatacat

SEQ ID NO: 23555 - RNA, 21 nt, synthetic construct
  source 1..21: mol_type = other RNA
cctccagagaaaggctcttaa

SEQ ID NO: 23556 - RNA, 21 nt, synthetic construct
  source 1..21: mol_type = other RNA
cctccattttgaagaataaac

SEQ ID NO: 23557 - RNA, 21 nt, synthetic construct
  source 1..21: mol_type = other RNA
cctcctgggttcaagtgattc

SEQ ID NO: 23558 - RNA, 21 nt, synthetic construct
  source 1..21: mol_type = other RNA
cctctatacatgccttttttg

SEQ ID NO: 23559 - RNA, 21 nt, synthetic construct
  source 1..21: mol_type = other RNA
cctctcagcactcatagcatt

SEQ ID NO: 23560 - RNA, 21 nt, synthetic construct
  source 1..21: mol_type = other RNA
cctgatatagcttgacaccaa

SEQ ID NO: 23561 - RNA, 21 nt, synthetic construct
  source 1..21: mol_type = other RNA
cctgccttgatctacacccat

SEQ ID NO: 23562 - RNA, 21 nt, synthetic construct
  source 1..21: mol_type = other RNA
cctgctcctgccttgatctac

SEQ ID NO: 23563 - RNA, 21 nt, synthetic construct
  source 1..21: mol_type = other RNA
cctggcaatattaatgtgtct

SEQ ID NO: 23564 - RNA, 21 nt, synthetic construct
  source 1..21: mol_type = other RNA
cctgggacatagcaattgctc

SEQ ID NO: 23565 - RNA, 21 nt, synthetic construct
  source 1..21: mol_type = other RNA
cctgggcaatggaatgagatt

SEQ ID NO: 23566 - RNA, 21 nt, synthetic construct
  source 1..21: mol_type = other RNA
cctgggttcaagtgattcctg

SEQ ID NO: 23567 - RNA, 21 nt, synthetic construct
  source 1..21: mol_type = other RNA
cctgtagtcccaggaatcact

SEQ ID NO: 23568 - RNA, 21 nt, synthetic construct
  source 1..21: mol_type = other RNA
ccttaacacatcactcaagag

SEQ ID NO: 23569 - RNA, 21 nt, synthetic construct
  source 1..21: mol_type = other RNA
ccttcccaacaagccacctcc

SEQ ID NO: 23570 - RNA, 21 nt, synthetic construct
  source 1..21: mol_type = other RNA
ccttgagagcctccagagaaa

SEQ ID NO: 23571 - RNA, 21 nt, synthetic construct
  source 1..21: mol_type = other RNA
ccttgatctacacccatctga

SEQ ID NO: 23572 - RNA, 21 nt, synthetic construct
  source 1..21: mol_type = other RNA
ccttgggttgatccacttagg

SEQ ID NO: 23573 - RNA, 21 nt, synthetic construct
  source 1..21: mol_type = other RNA
cctttctctggaggctctcaa

SEQ ID NO: 23574 - RNA, 21 nt, synthetic construct
  source 1..21: mol_type = other RNA
cctttctttttggttcctgct

SEQ ID NO: 23575 - RNA, 21 nt, synthetic construct
  source 1..21: mol_type = other RNA
cgatgaccaaatgtaaacact

SEQ ID NO: 23576 - RNA, 21 nt, synthetic construct
  source 1..21: mol_type = other RNA
cgatttctcccaattccattt

SEQ ID NO: 23577 - RNA, 21 nt, synthetic construct
  source 1..21: mol_type = other RNA
cgcaatctccagtgacagaag

SEQ ID NO: 23578 - RNA, 21 nt, synthetic construct
  source 1..21: mol_type = other RNA
cgcctcctgggttcaagtgat

SEQ ID NO: 23579 - RNA, 21 nt, synthetic construct
  source 1..21: mol_type = other RNA
cgctgcatttttaagagcctt

SEQ ID NO: 23580 - RNA, 21 nt, synthetic construct
  source 1..21: mol_type = other RNA
cgggaaaagacacattaatat

SEQ ID NO: 23581 - RNA, 21 nt, synthetic construct
  source 1..21: mol_type = other RNA
cggtttattcttcaaaatgga

SEQ ID NO: 23582 - RNA, 21 nt, synthetic construct
  source 1..21: mol_type = other RNA
cgtatagagcaattgctatgt

SEQ ID NO: 23583 - RNA, 21 nt, synthetic construct
  source 1..21: mol_type = other RNA
cgtgacttggtatctttccct

SEQ ID NO: 23584 - RNA, 21 nt, synthetic construct
  source 1..21: mol_type = other RNA
cgtggcagatgttattatctg

SEQ ID NO: 23585 - RNA, 21 nt, synthetic construct
  source 1..21: mol_type = other RNA
ctaaactgtatgaagtgtcta

SEQ ID NO: 23586 - RNA, 21 nt, synthetic construct
  source 1..21: mol_type = other RNA
ctaacttggtgtcaagctata

SEQ ID NO: 23587 - RNA, 21 nt, synthetic construct
  source 1..21: mol_type = other RNA
ctaagtggatcaacccaaggt

SEQ ID NO: 23588 - RNA, 21 nt, synthetic construct
  source 1..21: mol_type = other RNA
ctacacccatctgattttcta

SEQ ID NO: 23589 - RNA, 21 nt, synthetic construct
  source 1..21: mol_type = other RNA
ctacatgatttggccccaaga

SEQ ID NO: 23590 - RNA, 21 nt, synthetic construct
  source 1..21: mol_type = other RNA
ctactagacacttcatacagt

SEQ ID NO: 23591 - RNA, 21 nt, synthetic construct
  source 1..21: mol_type = other RNA
ctagaaatctgctagaaaaaa

SEQ ID NO: 23592 - RNA, 21 nt, synthetic construct
  source 1..21: mol_type = other RNA
ctagacacttcatacagttta

SEQ ID NO: 23593 - RNA, 21 nt, synthetic construct
  source 1..21: mol_type = other RNA
ctagcagatttctagcagtat

SEQ ID NO: 23594 - RNA, 21 nt, synthetic construct
  source 1..21: mol_type = other RNA
ctagcagtatcttctgtcact

SEQ ID NO: 23595 - RNA, 21 nt, synthetic construct
  source 1..21: mol_type = other RNA
ctagtagagtgcctgggacat

SEQ ID NO: 23596 - RNA, 21 nt, synthetic construct
  source 1..21: mol_type = other RNA
ctatacatgccttttttgttt

SEQ ID NO: 23597 - RNA, 21 nt, synthetic construct
  source 1..21: mol_type = other RNA
ctatacgtggcagatgttatt

SEQ ID NO: 23598 - RNA, 21 nt, synthetic construct
  source 1..21: mol_type = other RNA
ctatatcaggcaccaagtgtt

SEQ ID NO: 23599 - RNA, 21 nt, synthetic construct
  source 1..21: mol_type = other RNA
ctatgagtgctgagagggcat

SEQ ID NO: 23600 - RNA, 21 nt, synthetic construct
  source 1..21: mol_type = other RNA
ctatgtcccaggcactctact

SEQ ID NO: 23601 - RNA, 21 nt, synthetic construct
  source 1..21: mol_type = other RNA
ctattatgaactgagaaatga

SEQ ID NO: 23602 - RNA, 21 nt, synthetic construct
  source 1..21: mol_type = other RNA
ctcaagagtctacatgatttg

SEQ ID NO: 23603 - RNA, 21 nt, synthetic construct
  source 1..21: mol_type = other RNA
ctcaaggacttctgatgccct

SEQ ID NO: 23604 - RNA, 21 nt, synthetic construct
  source 1..21: mol_type = other RNA
ctcaccactgcacactgcact

SEQ ID NO: 23605 - RNA, 21 nt, synthetic construct
  source 1..21: mol_type = other RNA
ctcagataataacatctgcca

SEQ ID NO: 23606 - RNA, 21 nt, synthetic construct
  source 1..21: mol_type = other RNA
ctcagcactcatagcattcct

SEQ ID NO: 23607 - RNA, 21 nt, synthetic construct
  source 1..21: mol_type = other RNA
ctcagttcataatagccccca

SEQ ID NO: 23608 - RNA, 21 nt, synthetic construct
  source 1..21: mol_type = other RNA
ctcataattcctctatacatg

SEQ ID NO: 23609 - RNA, 21 nt, synthetic construct
  source 1..21: mol_type = other RNA
ctcatagcattccttaacaca

SEQ ID NO: 23610 - RNA, 21 nt, synthetic construct
  source 1..21: mol_type = other RNA
ctcatgttattgtactctgtt

SEQ ID NO: 23611 - RNA, 21 nt, synthetic construct
  source 1..21: mol_type = other RNA
ctcatttggccagagtggaaa

SEQ ID NO: 23612 - RNA, 21 nt, synthetic construct
  source 1..21: mol_type = other RNA
ctccagagaaaggctcttaaa

SEQ ID NO: 23613 - RNA, 21 nt, synthetic construct
  source 1..21: mol_type = other RNA
ctccagcctgggcaatggaat

SEQ ID NO: 23614 - RNA, 21 nt, synthetic construct
  source 1..21: mol_type = other RNA
ctccagtgacagaagatactg

SEQ ID NO: 23615 - RNA, 21 nt, synthetic construct
  source 1..21: mol_type = other RNA
ctccattttgaagaataaacc

SEQ ID NO: 23616 - RNA, 21 nt, synthetic construct
  source 1..21: mol_type = other RNA
ctcccaacttcaagtgatcag

SEQ ID NO: 23617 - RNA, 21 nt, synthetic construct
  source 1..21: mol_type = other RNA
ctcccaattccatttccactc

SEQ ID NO: 23618 - RNA, 21 nt, synthetic construct
  source 1..21: mol_type = other RNA
ctcctgccttgatctacaccc

SEQ ID NO: 23619 - RNA, 21 nt, synthetic construct
  source 1..21: mol_type = other RNA
ctcctgggttcaagtgattcc

SEQ ID NO: 23620 - RNA, 21 nt, synthetic construct
  source 1..21: mol_type = other RNA
ctctactagacacttcataca

SEQ ID NO: 23621 - RNA, 21 nt, synthetic construct
  source 1..21: mol_type = other RNA
ctctatacatgccttttttgt

SEQ ID NO: 23622 - RNA, 21 nt, synthetic construct
  source 1..21: mol_type = other RNA
ctctatacgtggcagatgtta

SEQ ID NO: 23623 - RNA, 21 nt, synthetic construct
  source 1..21: mol_type = other RNA
ctctcaaggacttctgatgcc

SEQ ID NO: 23624 - RNA, 21 nt, synthetic construct
  source 1..21: mol_type = other RNA
ctctcagcactcatagcattc

SEQ ID NO: 23625 - RNA, 21 nt, synthetic construct
  source 1..21: mol_type = other RNA
ctctggaggctctcaaggact

SEQ ID NO: 23626 - RNA, 21 nt, synthetic construct
  source 1..21: mol_type = other RNA
ctctggccaaatgagcttcca

SEQ ID NO: 23627 - RNA, 21 nt, synthetic construct
  source 1..21: mol_type = other RNA
ctctgtttccaccccttccat

SEQ ID NO: 23628 - RNA, 21 nt, synthetic construct
  source 1..21: mol_type = other RNA
ctcttaaaaatgcagcgcaat

SEQ ID NO: 23629 - RNA, 21 nt, synthetic construct
  source 1..21: mol_type = other RNA
ctcttgagtgatgtgttaagg

SEQ ID NO: 23630 - RNA, 21 nt, synthetic construct
  source 1..21: mol_type = other RNA
ctgagaaatgaactttgaaaa

SEQ ID NO: 23631 - RNA, 21 nt, synthetic construct
  source 1..21: mol_type = other RNA
ctgagagggcatcagaagtcc

SEQ ID NO: 23632 - RNA, 21 nt, synthetic construct
  source 1..21: mol_type = other RNA
ctgagatctcaccactgcaca

SEQ ID NO: 23633 - RNA, 21 nt, synthetic construct
  source 1..21: mol_type = other RNA
ctgaggaatatcgggaaaaga

SEQ ID NO: 23634 - RNA, 21 nt, synthetic construct
  source 1..21: mol_type = other RNA
ctgaggttcctaagtggatca

SEQ ID NO: 23635 - RNA, 21 nt, synthetic construct
  source 1..21: mol_type = other RNA
ctgatatagcttgacaccaag

SEQ ID NO: 23636 - RNA, 21 nt, synthetic construct
  source 1..21: mol_type = other RNA
ctgatcacttgaagttgggag

SEQ ID NO: 23637 - RNA, 21 nt, synthetic construct
  source 1..21: mol_type = other RNA
ctgatgccctctcagcactca

SEQ ID NO: 23638 - RNA, 21 nt, synthetic construct
  source 1..21: mol_type = other RNA
ctgattttctaaactgtatga

SEQ ID NO: 23639 - RNA, 21 nt, synthetic construct
  source 1..21: mol_type = other RNA
ctgcacactgcactccagcct

SEQ ID NO: 23640 - RNA, 21 nt, synthetic construct
  source 1..21: mol_type = other RNA
ctgcatttttaagagcctttc

SEQ ID NO: 23641 - RNA, 21 nt, synthetic construct
  source 1..21: mol_type = other RNA
ctgccacgtatagagcaattg

SEQ ID NO: 23642 - RNA, 21 nt, synthetic construct
  source 1..21: mol_type = other RNA
ctgccttgatctacacccatc

SEQ ID NO: 23643 - RNA, 21 nt, synthetic construct
  source 1..21: mol_type = other RNA
ctgctagaaatctgctagaaa

SEQ ID NO: 23644 - RNA, 21 nt, synthetic construct
  source 1..21: mol_type = other RNA
ctgctcctgccttgatctaca

SEQ ID NO: 23645 - RNA, 21 nt, synthetic construct
  source 1..21: mol_type = other RNA
ctggagattgcgctgcatttt

SEQ ID NO: 23646 - RNA, 21 nt, synthetic construct
  source 1..21: mol_type = other RNA
ctggaggctctcaaggacttc

SEQ ID NO: 23647 - RNA, 21 nt, synthetic construct
  source 1..21: mol_type = other RNA
ctggagtgcagtgtgcagtgg

SEQ ID NO: 23648 - RNA, 21 nt, synthetic construct
  source 1..21: mol_type = other RNA
ctggcaatattaatgtgtctt

SEQ ID NO: 23649 - RNA, 21 nt, synthetic construct
  source 1..21: mol_type = other RNA
ctggccaaatgagcttccacc

SEQ ID NO: 23650 - RNA, 21 nt, synthetic construct
  source 1..21: mol_type = other RNA
ctgggacatagcaattgctct

SEQ ID NO: 23651 - RNA, 21 nt, synthetic construct
  source 1..21: mol_type = other RNA
ctgggcaatggaatgagattc

SEQ ID NO: 23652 - RNA, 21 nt, synthetic construct
  source 1..21: mol_type = other RNA
ctgggttcaagtgattcctgg

SEQ ID NO: 23653 - RNA, 21 nt, synthetic construct
  source 1..21: mol_type = other RNA
ctgtagtcccaggaatcactt

SEQ ID NO: 23654 - RNA, 21 nt, synthetic construct
  source 1..21: mol_type = other RNA
ctgtatgaagtgtctagtaga

SEQ ID NO: 23655 - RNA, 21 nt, synthetic construct
  source 1..21: mol_type = other RNA
ctgtcactggagattgcgctg

SEQ ID NO: 23656 - RNA, 21 nt, synthetic construct
  source 1..21: mol_type = other RNA
ctgtttccaccccttccattt

SEQ ID NO: 23657 - RNA, 21 nt, synthetic construct
  source 1..21: mol_type = other RNA
cttaaaaatgcagcgcaatct

SEQ ID NO: 23658 - RNA, 21 nt, synthetic construct
  source 1..21: mol_type = other RNA
cttaacacatcactcaagagt

SEQ ID NO: 23659 - RNA, 21 nt, synthetic construct
  source 1..21: mol_type = other RNA
cttaggaacctcagataataa

SEQ ID NO: 23660 - RNA, 21 nt, synthetic construct
  source 1..21: mol_type = other RNA
cttatgtttatgcctttcttt

SEQ ID NO: 23661 - RNA, 21 nt, synthetic construct
  source 1..21: mol_type = other RNA
cttcaaaatggaggtggcttg

SEQ ID NO: 23662 - RNA, 21 nt, synthetic construct
  source 1..21: mol_type = other RNA
cttcaagtgatcagcctgcct

SEQ ID NO: 23663 - RNA, 21 nt, synthetic construct
  source 1..21: mol_type = other RNA
cttcatacagtttagaaaatc

SEQ ID NO: 23664 - RNA, 21 nt, synthetic construct
  source 1..21: mol_type = other RNA
cttccaccttcccaacaagcc

SEQ ID NO: 23665 - RNA, 21 nt, synthetic construct
  source 1..21: mol_type = other RNA
cttcccaacaagccacctcca

SEQ ID NO: 23666 - RNA, 21 nt, synthetic construct
  source 1..21: mol_type = other RNA
cttctgatgccctctcagcac

SEQ ID NO: 23667 - RNA, 21 nt, synthetic construct
  source 1..21: mol_type = other RNA
cttctgtcactggagattgcg

SEQ ID NO: 23668 - RNA, 21 nt, synthetic construct
  source 1..21: mol_type = other RNA
cttgaactcccaacttcaagt

SEQ ID NO: 23669 - RNA, 21 nt, synthetic construct
  source 1..21: mol_type = other RNA
cttgacaccaagttagcccca

SEQ ID NO: 23670 - RNA, 21 nt, synthetic construct
  source 1..21: mol_type = other RNA
cttgagagcctccagagaaag

SEQ ID NO: 23671 - RNA, 21 nt, synthetic construct
  source 1..21: mol_type = other RNA
cttgagtgatgtgttaaggaa

SEQ ID NO: 23672 - RNA, 21 nt, synthetic construct
  source 1..21: mol_type = other RNA
cttgatctacacccatctgat

SEQ ID NO: 23673 - RNA, 21 nt, synthetic construct
  source 1..21: mol_type = other RNA
cttggggccaaatcatgtaga

SEQ ID NO: 23674 - RNA, 21 nt, synthetic construct
  source 1..21: mol_type = other RNA
cttggggctaacttggtgtca

SEQ ID NO: 23675 - RNA, 21 nt, synthetic construct
  source 1..21: mol_type = other RNA
cttgggttgatccacttagga

SEQ ID NO: 23676 - RNA, 21 nt, synthetic construct
  source 1..21: mol_type = other RNA
cttggtatctttccctcataa

SEQ ID NO: 23677 - RNA, 21 nt, synthetic construct
  source 1..21: mol_type = other RNA
cttggtgcctgatatagcttg

SEQ ID NO: 23678 - RNA, 21 nt, synthetic construct
  source 1..21: mol_type = other RNA
cttggtgtcaagctatatcag

SEQ ID NO: 23679 - RNA, 21 nt, synthetic construct
  source 1..21: mol_type = other RNA
cttgttgggaaggtggaagct

SEQ ID NO: 23680 - RNA, 21 nt, synthetic construct
  source 1..21: mol_type = other RNA
ctttccctcataattcctcta

SEQ ID NO: 23681 - RNA, 21 nt, synthetic construct
  source 1..21: mol_type = other RNA
ctttctctggaggctctcaag

SEQ ID NO: 23682 - RNA, 21 nt, synthetic construct
  source 1..21: mol_type = other RNA
ctttctttttggttcctgctc

SEQ ID NO: 23683 - RNA, 21 nt, synthetic construct
  source 1..21: mol_type = other RNA
ctttgaaaagtatcttggggc

SEQ ID NO: 23684 - RNA, 21 nt, synthetic construct
  source 1..21: mol_type = other RNA
cttttcaaagttcatttctca

SEQ ID NO: 23685 - RNA, 21 nt, synthetic construct
  source 1..21: mol_type = other RNA
ctttttggttcctgctcctgc

SEQ ID NO: 23686 - RNA, 21 nt, synthetic construct
  source 1..21: mol_type = other RNA
gaaaagacacattaatattgc

SEQ ID NO: 23687 - RNA, 21 nt, synthetic construct
  source 1..21: mol_type = other RNA
gaaaagtatcttggggccaaa

SEQ ID NO: 23688 - RNA, 21 nt, synthetic construct
  source 1..21: mol_type = other RNA
gaaaatcagatgggtgtagat

SEQ ID NO: 23689 - RNA, 21 nt, synthetic construct
  source 1..21: mol_type = other RNA
gaaacagagtacaataacatg

SEQ ID NO: 23690 - RNA, 21 nt, synthetic construct
  source 1..21: mol_type = other RNA
gaaagataccaagtcacggtt

SEQ ID NO: 23691 - RNA, 21 nt, synthetic construct
  source 1..21: mol_type = other RNA
gaaaggcataaacataagaaa

SEQ ID NO: 23692 - RNA, 21 nt, synthetic construct
  source 1..21: mol_type = other RNA
gaaaggctcttaaaaatgcag

SEQ ID NO: 23693 - RNA, 21 nt, synthetic construct
  source 1..21: mol_type = other RNA
gaaataccctggcaatattaa

SEQ ID NO: 23694 - RNA, 21 nt, synthetic construct
  source 1..21: mol_type = other RNA
gaaatcgatgaccaaatgtaa

SEQ ID NO: 23695 - RNA, 21 nt, synthetic construct
  source 1..21: mol_type = other RNA
gaaatggaattgggagaaatc

SEQ ID NO: 23696 - RNA, 21 nt, synthetic construct
  source 1..21: mol_type = other RNA
gaacataccttgggttgatcc

SEQ ID NO: 23697 - RNA, 21 nt, synthetic construct
  source 1..21: mol_type = other RNA
gaaccaaaaagaaaggcataa

SEQ ID NO: 23698 - RNA, 21 nt, synthetic construct
  source 1..21: mol_type = other RNA
gaacctcagataataacatct

SEQ ID NO: 23699 - RNA, 21 nt, synthetic construct
  source 1..21: mol_type = other RNA
gaactcccaacttcaagtgat

SEQ ID NO: 23700 - RNA, 21 nt, synthetic construct
  source 1..21: mol_type = other RNA
gaactgagaaatgaactttga

SEQ ID NO: 23701 - RNA, 21 nt, synthetic construct
  source 1..21: mol_type = other RNA
gaactttgaaaagtatcttgg

SEQ ID NO: 23702 - RNA, 21 nt, synthetic construct
  source 1..21: mol_type = other RNA
gaagaataaaccgtgacttgg

SEQ ID NO: 23703 - RNA, 21 nt, synthetic construct
  source 1..21: mol_type = other RNA
gaagatactgctagaaatctg

SEQ ID NO: 23704 - RNA, 21 nt, synthetic construct
  source 1..21: mol_type = other RNA
gaagctcatttggccagagtg

SEQ ID NO: 23705 - RNA, 21 nt, synthetic construct
  source 1..21: mol_type = other RNA
gaaggggtggaaacagagtac

SEQ ID NO: 23706 - RNA, 21 nt, synthetic construct
  source 1..21: mol_type = other RNA
gaaggtggaagctcatttggc

SEQ ID NO: 23707 - RNA, 21 nt, synthetic construct
  source 1..21: mol_type = other RNA
gaagtccttgagagcctccag

SEQ ID NO: 23708 - RNA, 21 nt, synthetic construct
  source 1..21: mol_type = other RNA
gaagtgtctagtagagtgcct

SEQ ID NO: 23709 - RNA, 21 nt, synthetic construct
  source 1..21: mol_type = other RNA
gaataaaccgtgacttggtat

SEQ ID NO: 23710 - RNA, 21 nt, synthetic construct
  source 1..21: mol_type = other RNA
gaatatcgggaaaagacacat

SEQ ID NO: 23711 - RNA, 21 nt, synthetic construct
  source 1..21: mol_type = other RNA
gaatctcattccattgcccag

SEQ ID NO: 23712 - RNA, 21 nt, synthetic construct
  source 1..21: mol_type = other RNA
gaatgagattccatcccaaaa

SEQ ID NO: 23713 - RNA, 21 nt, synthetic construct
  source 1..21: mol_type = other RNA
gaatgctatgagtgctgagag

SEQ ID NO: 23714 - RNA, 21 nt, synthetic construct
  source 1..21: mol_type = other RNA
gaattatgagggaaagatacc

SEQ ID NO: 23715 - RNA, 21 nt, synthetic construct
  source 1..21: mol_type = other RNA
gaattgggagaaatcgatgac

SEQ ID NO: 23716 - RNA, 21 nt, synthetic construct
  source 1..21: mol_type = other RNA
gacacattaatattgccaggg

SEQ ID NO: 23717 - RNA, 21 nt, synthetic construct
  source 1..21: mol_type = other RNA
gacaccaagttagccccaagt

SEQ ID NO: 23718 - RNA, 21 nt, synthetic construct
  source 1..21: mol_type = other RNA
gacacttcatacagtttagaa

SEQ ID NO: 23719 - RNA, 21 nt, synthetic construct
  source 1..21: mol_type = other RNA
gacagaagatactgctagaaa

SEQ ID NO: 23720 - RNA, 21 nt, synthetic construct
  source 1..21: mol_type = other RNA
gacatagcaattgctctatac

SEQ ID NO: 23721 - RNA, 21 nt, synthetic construct
  source 1..21: mol_type = other RNA
gaccaaatgtaaacacttggt

SEQ ID NO: 23722 - RNA, 21 nt, synthetic construct
  source 1..21: mol_type = other RNA
gactcttgagtgatgtgttaa

SEQ ID NO: 23723 - RNA, 21 nt, synthetic construct
  source 1..21: mol_type = other RNA
gacttctgatgccctctcagc

SEQ ID NO: 23724 - RNA, 21 nt, synthetic construct
  source 1..21: mol_type = other RNA
gacttggtatctttccctcat

SEQ ID NO: 23725 - RNA, 21 nt, synthetic construct
  source 1..21: mol_type = other RNA
gagaaaggctcttaaaaatgc

SEQ ID NO: 23726 - RNA, 21 nt, synthetic construct
  source 1..21: mol_type = other RNA
gagaaatcgatgaccaaatgt

SEQ ID NO: 23727 - RNA, 21 nt, synthetic construct
  source 1..21: mol_type = other RNA
gagaaatgaactttgaaaagt

SEQ ID NO: 23728 - RNA, 21 nt, synthetic construct
  source 1..21: mol_type = other RNA
gagagcctccagagaaaggct

SEQ ID NO: 23729 - RNA, 21 nt, synthetic construct
  source 1..21: mol_type = other RNA
gagagggcatcagaagtcctt

SEQ ID NO: 23730 - RNA, 21 nt, synthetic construct
  source 1..21: mol_type = other RNA
gagatctcaccactgcacact

SEQ ID NO: 23731 - RNA, 21 nt, synthetic construct
  source 1..21: mol_type = other RNA
gagattccatcccaaaaaata

SEQ ID NO: 23732 - RNA, 21 nt, synthetic construct
  source 1..21: mol_type = other RNA
gagattgcgctgcatttttaa

SEQ ID NO: 23733 - RNA, 21 nt, synthetic construct
  source 1..21: mol_type = other RNA
gagcaattgctatgtcccagg

SEQ ID NO: 23734 - RNA, 21 nt, synthetic construct
  source 1..21: mol_type = other RNA
gagcaggaaccaaaaagaaag

SEQ ID NO: 23735 - RNA, 21 nt, synthetic construct
  source 1..21: mol_type = other RNA
gagcctccagagaaaggctct

SEQ ID NO: 23736 - RNA, 21 nt, synthetic construct
  source 1..21: mol_type = other RNA
gagcctttctctggaggctct

SEQ ID NO: 23737 - RNA, 21 nt, synthetic construct
  source 1..21: mol_type = other RNA
gagctgagatctcaccactgc

SEQ ID NO: 23738 - RNA, 21 nt, synthetic construct
  source 1..21: mol_type = other RNA
gagcttccaccttcccaacaa

SEQ ID NO: 23739 - RNA, 21 nt, synthetic construct
  source 1..21: mol_type = other RNA
gaggaatatcgggaaaagaca

SEQ ID NO: 23740 - RNA, 21 nt, synthetic construct
  source 1..21: mol_type = other RNA
gaggaattatgagggaaagat

SEQ ID NO: 23741 - RNA, 21 nt, synthetic construct
  source 1..21: mol_type = other RNA
gaggccaaggcaggctgatca

SEQ ID NO: 23742 - RNA, 21 nt, synthetic construct
  source 1..21: mol_type = other RNA
gaggctctcaaggacttctga

SEQ ID NO: 23743 - RNA, 21 nt, synthetic construct
  source 1..21: mol_type = other RNA
gagggaaagataccaagtcac

SEQ ID NO: 23744 - RNA, 21 nt, synthetic construct
  source 1..21: mol_type = other RNA
gagggcatcagaagtccttga

SEQ ID NO: 23745 - RNA, 21 nt, synthetic construct
  source 1..21: mol_type = other RNA
gaggtggcttgttgggaaggt

SEQ ID NO: 23746 - RNA, 21 nt, synthetic construct
  source 1..21: mol_type = other RNA
gaggttcctaagtggatcaac

SEQ ID NO: 23747 - RNA, 21 nt, synthetic construct
  source 1..21: mol_type = other RNA
gagtaatttgatgggggctat

SEQ ID NO: 23748 - RNA, 21 nt, synthetic construct
  source 1..21: mol_type = other RNA
gagtacaataacatgagtaat

SEQ ID NO: 23749 - RNA, 21 nt, synthetic construct
  source 1..21: mol_type = other RNA
gagtctacatgatttggcccc

SEQ ID NO: 23750 - RNA, 21 nt, synthetic construct
  source 1..21: mol_type = other RNA
gagtgatgtgttaaggaatgc

SEQ ID NO: 23751 - RNA, 21 nt, synthetic construct
  source 1..21: mol_type = other RNA
gagtgcagtgtgcagtggtga

SEQ ID NO: 23752 - RNA, 21 nt, synthetic construct
  source 1..21: mol_type = other RNA
gagtgcctgggacatagcaat

SEQ ID NO: 23753 - RNA, 21 nt, synthetic construct
  source 1..21: mol_type = other RNA
gagtgctgagagggcatcaga

SEQ ID NO: 23754 - RNA, 21 nt, synthetic construct
  source 1..21: mol_type = other RNA
gagtggaaatggaattgggag

SEQ ID NO: 23755 - RNA, 21 nt, synthetic construct
  source 1..21: mol_type = other RNA
gataataacatctgccacgta

SEQ ID NO: 23756 - RNA, 21 nt, synthetic construct
  source 1..21: mol_type = other RNA
gataccaagtcacggtttatt

SEQ ID NO: 23757 - RNA, 21 nt, synthetic construct
  source 1..21: mol_type = other RNA
gatactgctagaaatctgcta

SEQ ID NO: 23758 - RNA, 21 nt, synthetic construct
  source 1..21: mol_type = other RNA
gatatagcttgacaccaagtt

SEQ ID NO: 23759 - RNA, 21 nt, synthetic construct
  source 1..21: mol_type = other RNA
gatcaacccaaggtatgttct

SEQ ID NO: 23760 - RNA, 21 nt, synthetic construct
  source 1..21: mol_type = other RNA
gatcaaggcaggagcaggaac

SEQ ID NO: 23761 - RNA, 21 nt, synthetic construct
  source 1..21: mol_type = other RNA
gatccacttaggaacctcaga

SEQ ID NO: 23762 - RNA, 21 nt, synthetic construct
  source 1..21: mol_type = other RNA
gatctacacccatctgatttt

SEQ ID NO: 23763 - RNA, 21 nt, synthetic construct
  source 1..21: mol_type = other RNA
gatctcaccactgcacactgc

SEQ ID NO: 23764 - RNA, 21 nt, synthetic construct
  source 1..21: mol_type = other RNA
gatgaccaaatgtaaacactt

SEQ ID NO: 23765 - RNA, 21 nt, synthetic construct
  source 1..21: mol_type = other RNA
gatgccctctcagcactcata

SEQ ID NO: 23766 - RNA, 21 nt, synthetic construct
  source 1..21: mol_type = other RNA
gatggaatctcattccattgc

SEQ ID NO: 23767 - RNA, 21 nt, synthetic construct
  source 1..21: mol_type = other RNA
gatgggggctattatgaactg

SEQ ID NO: 23768 - RNA, 21 nt, synthetic construct
  source 1..21: mol_type = other RNA
gatgggtgtagatcaaggcag

SEQ ID NO: 23769 - RNA, 21 nt, synthetic construct
  source 1..21: mol_type = other RNA
gatgtgttaaggaatgctatg

SEQ ID NO: 23770 - RNA, 21 nt, synthetic construct
  source 1..21: mol_type = other RNA
gatgttattatctgaggttcc

SEQ ID NO: 23771 - RNA, 21 nt, synthetic construct
  source 1..21: mol_type = other RNA
gattccatcccaaaaaataaa

SEQ ID NO: 23772 - RNA, 21 nt, synthetic construct
  source 1..21: mol_type = other RNA
gattcctgggactacaggcac

SEQ ID NO: 23773 - RNA, 21 nt, synthetic construct
  source 1..21: mol_type = other RNA
gattgcgctgcatttttaaga

SEQ ID NO: 23774 - RNA, 21 nt, synthetic construct
  source 1..21: mol_type = other RNA
gatttctagcagtatcttctg

SEQ ID NO: 23775 - RNA, 21 nt, synthetic construct
  source 1..21: mol_type = other RNA
gatttctcccaattccatttc

SEQ ID NO: 23776 - RNA, 21 nt, synthetic construct
  source 1..21: mol_type = other RNA
gatttggccccaagatacttt

SEQ ID NO: 23777 - RNA, 21 nt, synthetic construct
  source 1..21: mol_type = other RNA
gattttctaaactgtatgaag

SEQ ID NO: 23778 - RNA, 21 nt, synthetic construct
  source 1..21: mol_type = other RNA
gcaatattaatgtgtcttttc

SEQ ID NO: 23779 - RNA, 21 nt, synthetic construct
  source 1..21: mol_type = other RNA
gcaatctccagtgacagaaga

SEQ ID NO: 23780 - RNA, 21 nt, synthetic construct
  source 1..21: mol_type = other RNA
gcaatggaatgagattccatc

SEQ ID NO: 23781 - RNA, 21 nt, synthetic construct
  source 1..21: mol_type = other RNA
gcaattgctatgtcccaggca

SEQ ID NO: 23782 - RNA, 21 nt, synthetic construct
  source 1..21: mol_type = other RNA
gcaattgctctatacgtggca

SEQ ID NO: 23783 - RNA, 21 nt, synthetic construct
  source 1..21: mol_type = other RNA
gcacactgcactccagcctgg

SEQ ID NO: 23784 - RNA, 21 nt, synthetic construct
  source 1..21: mol_type = other RNA
gcaccaagtgtttacatttgg

SEQ ID NO: 23785 - RNA, 21 nt, synthetic construct
  source 1..21: mol_type = other RNA
gcactcatagcattccttaac

SEQ ID NO: 23786 - RNA, 21 nt, synthetic construct
  source 1..21: mol_type = other RNA
gcactctactagacacttcat

SEQ ID NO: 23787 - RNA, 21 nt, synthetic construct
  source 1..21: mol_type = other RNA
gcagatgttattatctgaggt

SEQ ID NO: 23788 - RNA, 21 nt, synthetic construct
  source 1..21: mol_type = other RNA
gcagatttctagcagtatctt

SEQ ID NO: 23789 - RNA, 21 nt, synthetic construct
  source 1..21: mol_type = other RNA
gcagcgcaatctccagtgaca

SEQ ID NO: 23790 - RNA, 21 nt, synthetic construct
  source 1..21: mol_type = other RNA
gcaggaaccaaaaagaaaggc

SEQ ID NO: 23791 - RNA, 21 nt, synthetic construct
  source 1..21: mol_type = other RNA
gcaggagcaggaaccaaaaag

SEQ ID NO: 23792 - RNA, 21 nt, synthetic construct
  source 1..21: mol_type = other RNA
gcaggctgatcacttgaagtt

SEQ ID NO: 23793 - RNA, 21 nt, synthetic construct
  source 1..21: mol_type = other RNA
gcagtatcttctgtcactgga

SEQ ID NO: 23794 - RNA, 21 nt, synthetic construct
  source 1..21: mol_type = other RNA
gcagtgagctgagatctcacc

SEQ ID NO: 23795 - RNA, 21 nt, synthetic construct
  source 1..21: mol_type = other RNA
gcagtgtgcagtggtgagatc

SEQ ID NO: 23796 - RNA, 21 nt, synthetic construct
  source 1..21: mol_type = other RNA
gcatcagaagtccttgagagc

SEQ ID NO: 23797 - RNA, 21 nt, synthetic construct
  source 1..21: mol_type = other RNA
gcatgtatagaggaattatga

SEQ ID NO: 23798 - RNA, 21 nt, synthetic construct
  source 1..21: mol_type = other RNA
gcattccttaacacatcactc

SEQ ID NO: 23799 - RNA, 21 nt, synthetic construct
  source 1..21: mol_type = other RNA
gcatttttaagagcctttctc

SEQ ID NO: 23800 - RNA, 21 nt, synthetic construct
  source 1..21: mol_type = other RNA
gccaaatcatgtagactcttg

SEQ ID NO: 23801 - RNA, 21 nt, synthetic construct
  source 1..21: mol_type = other RNA
gccaaatgagcttccaccttc

SEQ ID NO: 23802 - RNA, 21 nt, synthetic construct
  source 1..21: mol_type = other RNA
gccaaggcaggctgatcactt

SEQ ID NO: 23803 - RNA, 21 nt, synthetic construct
  source 1..21: mol_type = other RNA
gccacctccattttgaagaat

SEQ ID NO: 23804 - RNA, 21 nt, synthetic construct
  source 1..21: mol_type = other RNA
gccacgtatagagcaattgct

SEQ ID NO: 23805 - RNA, 21 nt, synthetic construct
  source 1..21: mol_type = other RNA
gccagagtggaaatggaattg

SEQ ID NO: 23806 - RNA, 21 nt, synthetic construct
  source 1..21: mol_type = other RNA
gccagggtatttcacttgggg

SEQ ID NO: 23807 - RNA, 21 nt, synthetic construct
  source 1..21: mol_type = other RNA
gccccaagatacttttcaaag

SEQ ID NO: 23808 - RNA, 21 nt, synthetic construct
  source 1..21: mol_type = other RNA
gccccaagtgaaataccctgg

SEQ ID NO: 23809 - RNA, 21 nt, synthetic construct
  source 1..21: mol_type = other RNA
gcccccatcaaattactcatg

SEQ ID NO: 23810 - RNA, 21 nt, synthetic construct
  source 1..21: mol_type = other RNA
gccctctcagcactcatagca

SEQ ID NO: 23811 - RNA, 21 nt, synthetic construct
  source 1..21: mol_type = other RNA
gcctccagagaaaggctctta

SEQ ID NO: 23812 - RNA, 21 nt, synthetic construct
  source 1..21: mol_type = other RNA
gcctcctgggttcaagtgatt

SEQ ID NO: 23813 - RNA, 21 nt, synthetic construct
  source 1..21: mol_type = other RNA
gcctgatatagcttgacacca

SEQ ID NO: 23814 - RNA, 21 nt, synthetic construct
  source 1..21: mol_type = other RNA
gcctgggacatagcaattgct

SEQ ID NO: 23815 - RNA, 21 nt, synthetic construct
  source 1..21: mol_type = other RNA
gcctgggcaatggaatgagat

SEQ ID NO: 23816 - RNA, 21 nt, synthetic construct
  source 1..21: mol_type = other RNA
gcctgtagtcccaggaatcac

SEQ ID NO: 23817 - RNA, 21 nt, synthetic construct
  source 1..21: mol_type = other RNA
gccttgatctacacccatctg

SEQ ID NO: 23818 - RNA, 21 nt, synthetic construct
  source 1..21: mol_type = other RNA
gcctttctctggaggctctca

SEQ ID NO: 23819 - RNA, 21 nt, synthetic construct
  source 1..21: mol_type = other RNA
gcctttctttttggttcctgc

SEQ ID NO: 23820 - RNA, 21 nt, synthetic construct
  source 1..21: mol_type = other RNA
gcgcaatctccagtgacagaa

SEQ ID NO: 23821 - RNA, 21 nt, synthetic construct
  source 1..21: mol_type = other RNA
gcgctgcatttttaagagcct

SEQ ID NO: 23822 - RNA, 21 nt, synthetic construct
  source 1..21: mol_type = other RNA
gctaacttggtgtcaagctat

SEQ ID NO: 23823 - RNA, 21 nt, synthetic construct
  source 1..21: mol_type = other RNA
gctagaaatctgctagaaaaa

SEQ ID NO: 23824 - RNA, 21 nt, synthetic construct
  source 1..21: mol_type = other RNA
gctatatcaggcaccaagtgt

SEQ ID NO: 23825 - RNA, 21 nt, synthetic construct
  source 1..21: mol_type = other RNA
gctatgagtgctgagagggca

SEQ ID NO: 23826 - RNA, 21 nt, synthetic construct
  source 1..21: mol_type = other RNA
gctatgtcccaggcactctac

SEQ ID NO: 23827 - RNA, 21 nt, synthetic construct
  source 1..21: mol_type = other RNA
gctattatgaactgagaaatg

SEQ ID NO: 23828 - RNA, 21 nt, synthetic construct
  source 1..21: mol_type = other RNA
gctcatttggccagagtggaa

SEQ ID NO: 23829 - RNA, 21 nt, synthetic construct
  source 1..21: mol_type = other RNA
gctcctgccttgatctacacc

SEQ ID NO: 23830 - RNA, 21 nt, synthetic construct
  source 1..21: mol_type = other RNA
gctctatacgtggcagatgtt

SEQ ID NO: 23831 - RNA, 21 nt, synthetic construct
  source 1..21: mol_type = other RNA
gctctcaaggacttctgatgc

SEQ ID NO: 23832 - RNA, 21 nt, synthetic construct
  source 1..21: mol_type = other RNA
gctcttaaaaatgcagcgcaa

SEQ ID NO: 23833 - RNA, 21 nt, synthetic construct
  source 1..21: mol_type = other RNA
gctgagagggcatcagaagtc

SEQ ID NO: 23834 - RNA, 21 nt, synthetic construct
  source 1..21: mol_type = other RNA
gctgagatctcaccactgcac

SEQ ID NO: 23835 - RNA, 21 nt, synthetic construct
  source 1..21: mol_type = other RNA
gctgatcacttgaagttggga

SEQ ID NO: 23836 - RNA, 21 nt, synthetic construct
  source 1..21: mol_type = other RNA
gctgcatttttaagagccttt

SEQ ID NO: 23837 - RNA, 21 nt, synthetic construct
  source 1..21: mol_type = other RNA
gctggagtgcagtgtgcagtg

SEQ ID NO: 23838 - RNA, 21 nt, synthetic construct
  source 1..21: mol_type = other RNA
gcttccaccttcccaacaagc

SEQ ID NO: 23839 - RNA, 21 nt, synthetic construct
  source 1..21: mol_type = other RNA
gcttgacaccaagttagcccc

SEQ ID NO: 23840 - RNA, 21 nt, synthetic construct
  source 1..21: mol_type = other RNA
gcttgttgggaaggtggaagc

SEQ ID NO: 23841 - RNA, 21 nt, synthetic construct
  source 1..21: mol_type = other RNA
ggaaaagacacattaatattg

SEQ ID NO: 23842 - RNA, 21 nt, synthetic construct
  source 1..21: mol_type = other RNA
ggaaacagagtacaataacat

SEQ ID NO: 23843 - RNA, 21 nt, synthetic construct
  source 1..21: mol_type = other RNA
ggaaagataccaagtcacggt

SEQ ID NO: 23844 - RNA, 21 nt, synthetic construct
  source 1..21: mol_type = other RNA
ggaaatggaattgggagaaat

SEQ ID NO: 23845 - RNA, 21 nt, synthetic construct
  source 1..21: mol_type = other RNA
ggaaccaaaaagaaaggcata

SEQ ID NO: 23846 - RNA, 21 nt, synthetic construct
  source 1..21: mol_type = other RNA
ggaacctcagataataacatc

SEQ ID NO: 23847 - RNA, 21 nt, synthetic construct
  source 1..21: mol_type = other RNA
ggaagctcatttggccagagt

SEQ ID NO: 23848 - RNA, 21 nt, synthetic construct
  source 1..21: mol_type = other RNA
ggaaggggtggaaacagagta

SEQ ID NO: 23849 - RNA, 21 nt, synthetic construct
  source 1..21: mol_type = other RNA
ggaaggtggaagctcatttgg

SEQ ID NO: 23850 - RNA, 21 nt, synthetic construct
  source 1..21: mol_type = other RNA
ggaatatcgggaaaagacaca

SEQ ID NO: 23851 - RNA, 21 nt, synthetic construct
  source 1..21: mol_type = other RNA
ggaatctcattccattgccca

SEQ ID NO: 23852 - RNA, 21 nt, synthetic construct
  source 1..21: mol_type = other RNA
ggaatgagattccatcccaaa

SEQ ID NO: 23853 - RNA, 21 nt, synthetic construct
  source 1..21: mol_type = other RNA
ggaatgctatgagtgctgaga

SEQ ID NO: 23854 - RNA, 21 nt, synthetic construct
  source 1..21: mol_type = other RNA
ggaattatgagggaaagatac

SEQ ID NO: 23855 - RNA, 21 nt, synthetic construct
  source 1..21: mol_type = other RNA
ggaattgggagaaatcgatga

SEQ ID NO: 23856 - RNA, 21 nt, synthetic construct
  source 1..21: mol_type = other RNA
ggacatagcaattgctctata

SEQ ID NO: 23857 - RNA, 21 nt, synthetic construct
  source 1..21: mol_type = other RNA
ggacttctgatgccctctcag

SEQ ID NO: 23858 - RNA, 21 nt, synthetic construct
  source 1..21: mol_type = other RNA
ggagaaatcgatgaccaaatg

SEQ ID NO: 23859 - RNA, 21 nt, synthetic construct
  source 1..21: mol_type = other RNA
ggagattgcgctgcattttta

SEQ ID NO: 23860 - RNA, 21 nt, synthetic construct
  source 1..21: mol_type = other RNA
ggagcaggaaccaaaaagaaa

SEQ ID NO: 23861 - RNA, 21 nt, synthetic construct
  source 1..21: mol_type = other RNA
ggaggccaaggcaggctgatc

SEQ ID NO: 23862 - RNA, 21 nt, synthetic construct
  source 1..21: mol_type = other RNA
ggaggctctcaaggacttctg

SEQ ID NO: 23863 - RNA, 21 nt, synthetic construct
  source 1..21: mol_type = other RNA
ggaggtggcttgttgggaagg

SEQ ID NO: 23864 - RNA, 21 nt, synthetic construct
  source 1..21: mol_type = other RNA
ggagtgcagtgtgcagtggtg

SEQ ID NO: 23865 - RNA, 21 nt, synthetic construct
  source 1..21: mol_type = other RNA
ggatcaacccaaggtatgttc

SEQ ID NO: 23866 - RNA, 21 nt, synthetic construct
  source 1..21: mol_type = other RNA
ggatggaatctcattccattg

SEQ ID NO: 23867 - RNA, 21 nt, synthetic construct
  source 1..21: mol_type = other RNA
ggcaatattaatgtgtctttt

SEQ ID NO: 23868 - RNA, 21 nt, synthetic construct
  source 1..21: mol_type = other RNA
ggcaatggaatgagattccat

SEQ ID NO: 23869 - RNA, 21 nt, synthetic construct
  source 1..21: mol_type = other RNA
ggcaccaagtgtttacatttg

SEQ ID NO: 23870 - RNA, 21 nt, synthetic construct
  source 1..21: mol_type = other RNA
ggcactctactagacacttca

SEQ ID NO: 23871 - RNA, 21 nt, synthetic construct
  source 1..21: mol_type = other RNA
ggcagatgttattatctgagg

SEQ ID NO: 23872 - RNA, 21 nt, synthetic construct
  source 1..21: mol_type = other RNA
ggcaggagcaggaaccaaaaa

SEQ ID NO: 23873 - RNA, 21 nt, synthetic construct
  source 1..21: mol_type = other RNA
ggcaggctgatcacttgaagt

SEQ ID NO: 23874 - RNA, 21 nt, synthetic construct
  source 1..21: mol_type = other RNA
ggcatcagaagtccttgagag

SEQ ID NO: 23875 - RNA, 21 nt, synthetic construct
  source 1..21: mol_type = other RNA
ggcatgtatagaggaattatg

SEQ ID NO: 23876 - RNA, 21 nt, synthetic construct
  source 1..21: mol_type = other RNA
ggccaaatcatgtagactctt

SEQ ID NO: 23877 - RNA, 21 nt, synthetic construct
  source 1..21: mol_type = other RNA
ggccaaatgagcttccacctt

SEQ ID NO: 23878 - RNA, 21 nt, synthetic construct
  source 1..21: mol_type = other RNA
ggccaaggcaggctgatcact

SEQ ID NO: 23879 - RNA, 21 nt, synthetic construct
  source 1..21: mol_type = other RNA
ggccagagtggaaatggaatt

SEQ ID NO: 23880 - RNA, 21 nt, synthetic construct
  source 1..21: mol_type = other RNA
ggccccaagatacttttcaaa

SEQ ID NO: 23881 - RNA, 21 nt, synthetic construct
  source 1..21: mol_type = other RNA
ggctaacttggtgtcaagcta

SEQ ID NO: 23882 - RNA, 21 nt, synthetic construct
  source 1..21: mol_type = other RNA
ggctattatgaactgagaaat

SEQ ID NO: 23883 - RNA, 21 nt, synthetic construct
  source 1..21: mol_type = other RNA
ggctctcaaggacttctgatg

SEQ ID NO: 23884 - RNA, 21 nt, synthetic construct
  source 1..21: mol_type = other RNA
ggctcttaaaaatgcagcgca

SEQ ID NO: 23885 - RNA, 21 nt, synthetic construct
  source 1..21: mol_type = other RNA
ggctgatcacttgaagttggg

SEQ ID NO: 23886 - RNA, 21 nt, synthetic construct
  source 1..21: mol_type = other RNA
ggctggagtgcagtgtgcagt

SEQ ID NO: 23887 - RNA, 21 nt, synthetic construct
  source 1..21: mol_type = other RNA
ggcttgttgggaaggtggaag

SEQ ID NO: 23888 - RNA, 21 nt, synthetic construct
  source 1..21: mol_type = other RNA
gggaaaagacacattaatatt

SEQ ID NO: 23889 - RNA, 21 nt, synthetic construct
  source 1..21: mol_type = other RNA
gggaaagataccaagtcacgg

SEQ ID NO: 23890 - RNA, 21 nt, synthetic construct
  source 1..21: mol_type = other RNA
gggaaggtggaagctcatttg

SEQ ID NO: 23891 - RNA, 21 nt, synthetic construct
  source 1..21: mol_type = other RNA
gggacatagcaattgctctat

SEQ ID NO: 23892 - RNA, 21 nt, synthetic construct
  source 1..21: mol_type = other RNA
gggagaaatcgatgaccaaat

SEQ ID NO: 23893 - RNA, 21 nt, synthetic construct
  source 1..21: mol_type = other RNA
gggatggaatctcattccatt

SEQ ID NO: 23894 - RNA, 21 nt, synthetic construct
  source 1..21: mol_type = other RNA
gggcaatggaatgagattcca

SEQ ID NO: 23895 - RNA, 21 nt, synthetic construct
  source 1..21: mol_type = other RNA
gggcatcagaagtccttgaga

SEQ ID NO: 23896 - RNA, 21 nt, synthetic construct
  source 1..21: mol_type = other RNA
gggccaaatcatgtagactct

SEQ ID NO: 23897 - RNA, 21 nt, synthetic construct
  source 1..21: mol_type = other RNA
gggctaacttggtgtcaagct

SEQ ID NO: 23898 - RNA, 21 nt, synthetic construct
  source 1..21: mol_type = other RNA
gggctattatgaactgagaaa

SEQ ID NO: 23899 - RNA, 21 nt, synthetic construct
  source 1..21: mol_type = other RNA
ggggccaaatcatgtagactc

SEQ ID NO: 23900 - RNA, 21 nt, synthetic construct
  source 1..21: mol_type = other RNA
ggggctaacttggtgtcaagc

SEQ ID NO: 23901 - RNA, 21 nt, synthetic construct
  source 1..21: mol_type = other RNA
ggggctattatgaactgagaa

SEQ ID NO: 23902 - RNA, 21 nt, synthetic construct
  source 1..21: mol_type = other RNA
gggggctattatgaactgaga

SEQ ID NO: 23903 - RNA, 21 nt, synthetic construct
  source 1..21: mol_type = other RNA
ggggtggaaacagagtacaat

SEQ ID NO: 23904 - RNA, 21 nt, synthetic construct
  source 1..21: mol_type = other RNA
gggtatttcacttggggctaa

SEQ ID NO: 23905 - RNA, 21 nt, synthetic construct
  source 1..21: mol_type = other RNA
gggtggaaacagagtacaata

SEQ ID NO: 23906 - RNA, 21 nt, synthetic construct
  source 1..21: mol_type = other RNA
gggtgtagatcaaggcaggag

SEQ ID NO: 23907 - RNA, 21 nt, synthetic construct
  source 1..21: mol_type = other RNA
gggttcaagtgattcctggga

SEQ ID NO: 23908 - RNA, 21 nt, synthetic construct
  source 1..21: mol_type = other RNA
gggttgatccacttaggaacc

SEQ ID NO: 23909 - RNA, 21 nt, synthetic construct
  source 1..21: mol_type = other RNA
ggtatctttccctcataattc

SEQ ID NO: 23910 - RNA, 21 nt, synthetic construct
  source 1..21: mol_type = other RNA
ggtatttcacttggggctaac

SEQ ID NO: 23911 - RNA, 21 nt, synthetic construct
  source 1..21: mol_type = other RNA
ggtcatcgatttctcccaatt

SEQ ID NO: 23912 - RNA, 21 nt, synthetic construct
  source 1..21: mol_type = other RNA
ggtcttgaactcccaacttca

SEQ ID NO: 23913 - RNA, 21 nt, synthetic construct
  source 1..21: mol_type = other RNA
ggtgcctgatatagcttgaca

SEQ ID NO: 23914 - RNA, 21 nt, synthetic construct
  source 1..21: mol_type = other RNA
ggtggaaacagagtacaataa

SEQ ID NO: 23915 - RNA, 21 nt, synthetic construct
  source 1..21: mol_type = other RNA
ggtggaagctcatttggccag

SEQ ID NO: 23916 - RNA, 21 nt, synthetic construct
  source 1..21: mol_type = other RNA
ggtggcttgttgggaaggtgg

SEQ ID NO: 23917 - RNA, 21 nt, synthetic construct
  source 1..21: mol_type = other RNA
ggtggtgtgtgcctgtagtcc

SEQ ID NO: 23918 - RNA, 21 nt, synthetic construct
  source 1..21: mol_type = other RNA
ggtgtagatcaaggcaggagc

SEQ ID NO: 23919 - RNA, 21 nt, synthetic construct
  source 1..21: mol_type = other RNA
ggtgtcaagctatatcaggca

SEQ ID NO: 23920 - RNA, 21 nt, synthetic construct
  source 1..21: mol_type = other RNA
ggtgtgtgcctgtagtcccag

SEQ ID NO: 23921 - RNA, 21 nt, synthetic construct
  source 1..21: mol_type = other RNA
ggttcaagtgattcctgggac

SEQ ID NO: 23922 - RNA, 21 nt, synthetic construct
  source 1..21: mol_type = other RNA
ggttcctaagtggatcaaccc

SEQ ID NO: 23923 - RNA, 21 nt, synthetic construct
  source 1..21: mol_type = other RNA
ggttcctgctcctgccttgat

SEQ ID NO: 23924 - RNA, 21 nt, synthetic construct
  source 1..21: mol_type = other RNA
ggttgatccacttaggaacct

SEQ ID NO: 23925 - RNA, 21 nt, synthetic construct
  source 1..21: mol_type = other RNA
ggtttattcttcaaaatggag

SEQ ID NO: 23926 - RNA, 21 nt, synthetic construct
  source 1..21: mol_type = other RNA
gtaaacacttggtgcctgata

SEQ ID NO: 23927 - RNA, 21 nt, synthetic construct
  source 1..21: mol_type = other RNA
gtaatttgatgggggctatta

SEQ ID NO: 23928 - RNA, 21 nt, synthetic construct
  source 1..21: mol_type = other RNA
gtactctgtttccaccccttc

SEQ ID NO: 23929 - RNA, 21 nt, synthetic construct
  source 1..21: mol_type = other RNA
gtagactcttgagtgatgtgt

SEQ ID NO: 23930 - RNA, 21 nt, synthetic construct
  source 1..21: mol_type = other RNA
gtagagtgcctgggacatagc

SEQ ID NO: 23931 - RNA, 21 nt, synthetic construct
  source 1..21: mol_type = other RNA
gtagatcaaggcaggagcagg

SEQ ID NO: 23932 - RNA, 21 nt, synthetic construct
  source 1..21: mol_type = other RNA
gtagtcccaggaatcacttga

SEQ ID NO: 23933 - RNA, 21 nt, synthetic construct
  source 1..21: mol_type = other RNA
gtatagagcaattgctatgtc

SEQ ID NO: 23934 - RNA, 21 nt, synthetic construct
  source 1..21: mol_type = other RNA
gtatagaggaattatgaggga

SEQ ID NO: 23935 - RNA, 21 nt, synthetic construct
  source 1..21: mol_type = other RNA
gtatcttctgtcactggagat

SEQ ID NO: 23936 - RNA, 21 nt, synthetic construct
  source 1..21: mol_type = other RNA
gtatcttggggccaaatcatg

SEQ ID NO: 23937 - RNA, 21 nt, synthetic construct
  source 1..21: mol_type = other RNA
gtatctttccctcataattcc

SEQ ID NO: 23938 - RNA, 21 nt, synthetic construct
  source 1..21: mol_type = other RNA
gtatgaagtgtctagtagagt

SEQ ID NO: 23939 - RNA, 21 nt, synthetic construct
  source 1..21: mol_type = other RNA
gtatttcacttggggctaact

SEQ ID NO: 23940 - RNA, 21 nt, synthetic construct
  source 1..21: mol_type = other RNA
gtcaagctatatcaggcacca

SEQ ID NO: 23941 - RNA, 21 nt, synthetic construct
  source 1..21: mol_type = other RNA
gtcacggtttattcttcaaaa

SEQ ID NO: 23942 - RNA, 21 nt, synthetic construct
  source 1..21: mol_type = other RNA
gtcactggagattgcgctgca

SEQ ID NO: 23943 - RNA, 21 nt, synthetic construct
  source 1..21: mol_type = other RNA
gtcatcgatttctcccaattc

SEQ ID NO: 23944 - RNA, 21 nt, synthetic construct
  source 1..21: mol_type = other RNA
gtcccaggaatcacttgaacc

SEQ ID NO: 23945 - RNA, 21 nt, synthetic construct
  source 1..21: mol_type = other RNA
gtcccaggcactctactagac

SEQ ID NO: 23946 - RNA, 21 nt, synthetic construct
  source 1..21: mol_type = other RNA
gtccttgagagcctccagaga

SEQ ID NO: 23947 - RNA, 21 nt, synthetic construct
  source 1..21: mol_type = other RNA
gtctacatgatttggccccaa

SEQ ID NO: 23948 - RNA, 21 nt, synthetic construct
  source 1..21: mol_type = other RNA
gtctagtagagtgcctgggac

SEQ ID NO: 23949 - RNA, 21 nt, synthetic construct
  source 1..21: mol_type = other RNA
gtcttgaactcccaacttcaa

SEQ ID NO: 23950 - RNA, 21 nt, synthetic construct
  source 1..21: mol_type = other RNA
gtgaaataccctggcaatatt

SEQ ID NO: 23951 - RNA, 21 nt, synthetic construct
  source 1..21: mol_type = other RNA
gtgacagaagatactgctaga

SEQ ID NO: 23952 - RNA, 21 nt, synthetic construct
  source 1..21: mol_type = other RNA
gtgacttggtatctttccctc

SEQ ID NO: 23953 - RNA, 21 nt, synthetic construct
  source 1..21: mol_type = other RNA
gtgagctgagatctcaccact

SEQ ID NO: 23954 - RNA, 21 nt, synthetic construct
  source 1..21: mol_type = other RNA
gtgatgtgttaaggaatgcta

SEQ ID NO: 23955 - RNA, 21 nt, synthetic construct
  source 1..21: mol_type = other RNA
gtgattcctgggactacaggc

SEQ ID NO: 23956 - RNA, 21 nt, synthetic construct
  source 1..21: mol_type = other RNA
gtgcagtgtgcagtggtgaga

SEQ ID NO: 23957 - RNA, 21 nt, synthetic construct
  source 1..21: mol_type = other RNA
gtgcctgatatagcttgacac

SEQ ID NO: 23958 - RNA, 21 nt, synthetic construct
  source 1..21: mol_type = other RNA
gtgcctgggacatagcaattg

SEQ ID NO: 23959 - RNA, 21 nt, synthetic construct
  source 1..21: mol_type = other RNA
gtgcctgtagtcccaggaatc

SEQ ID NO: 23960 - RNA, 21 nt, synthetic construct
  source 1..21: mol_type = other RNA
gtgctgagagggcatcagaag

SEQ ID NO: 23961 - RNA, 21 nt, synthetic construct
  source 1..21: mol_type = other RNA
gtggaaacagagtacaataac

SEQ ID NO: 23962 - RNA, 21 nt, synthetic construct
  source 1..21: mol_type = other RNA
gtggaaatggaattgggagaa

SEQ ID NO: 23963 - RNA, 21 nt, synthetic construct
  source 1..21: mol_type = other RNA
gtggaagctcatttggccaga

SEQ ID NO: 23964 - RNA, 21 nt, synthetic construct
  source 1..21: mol_type = other RNA
gtggatcaacccaaggtatgt

SEQ ID NO: 23965 - RNA, 21 nt, synthetic construct
  source 1..21: mol_type = other RNA
gtggcagatgttattatctga

SEQ ID NO: 23966 - RNA, 21 nt, synthetic construct
  source 1..21: mol_type = other RNA
gtggcttgttgggaaggtgga

SEQ ID NO: 23967 - RNA, 21 nt, synthetic construct
  source 1..21: mol_type = other RNA
gtggtgtgtgcctgtagtccc

SEQ ID NO: 23968 - RNA, 21 nt, synthetic construct
  source 1..21: mol_type = other RNA
gtgtagatcaaggcaggagca

SEQ ID NO: 23969 - RNA, 21 nt, synthetic construct
  source 1..21: mol_type = other RNA
gtgtcaagctatatcaggcac

SEQ ID NO: 23970 - RNA, 21 nt, synthetic construct
  source 1..21: mol_type = other RNA
gtgtctagtagagtgcctggg

SEQ ID NO: 23971 - RNA, 21 nt, synthetic construct
  source 1..21: mol_type = other RNA
gtgtgcagtggtgagatctca

SEQ ID NO: 23972 - RNA, 21 nt, synthetic construct
  source 1..21: mol_type = other RNA
gtgtgcctgtagtcccaggaa

SEQ ID NO: 23973 - RNA, 21 nt, synthetic construct
  source 1..21: mol_type = other RNA
gtgtgtgcctgtagtcccagg

SEQ ID NO: 23974 - RNA, 21 nt, synthetic construct
  source 1..21: mol_type = other RNA
gtgttaaggaatgctatgagt

SEQ ID NO: 23975 - RNA, 21 nt, synthetic construct
  source 1..21: mol_type = other RNA
gtgtttacatttggtcatcga

SEQ ID NO: 23976 - RNA, 21 nt, synthetic construct
  source 1..21: mol_type = other RNA
gttaaggaatgctatgagtgc

SEQ ID NO: 23977 - RNA, 21 nt, synthetic construct
  source 1..21: mol_type = other RNA
gttagccccaagtgaaatacc

SEQ ID NO: 23978 - RNA, 21 nt, synthetic construct
  source 1..21: mol_type = other RNA
gttattatctgaggttcctaa

SEQ ID NO: 23979 - RNA, 21 nt, synthetic construct
  source 1..21: mol_type = other RNA
gttattgtactctgtttccac

SEQ ID NO: 23980 - RNA, 21 nt, synthetic construct
  source 1..21: mol_type = other RNA
gttcaagtgattcctgggact

SEQ ID NO: 23981 - RNA, 21 nt, synthetic construct
  source 1..21: mol_type = other RNA
gttcataatagcccccatcaa

SEQ ID NO: 23982 - RNA, 21 nt, synthetic construct
  source 1..21: mol_type = other RNA
gttcatttctcagttcataat

SEQ ID NO: 23983 - RNA, 21 nt, synthetic construct
  source 1..21: mol_type = other RNA
gttcctaagtggatcaaccca

SEQ ID NO: 23984 - RNA, 21 nt, synthetic construct
  source 1..21: mol_type = other RNA
gttcctgctcctgccttgatc

SEQ ID NO: 23985 - RNA, 21 nt, synthetic construct
  source 1..21: mol_type = other RNA
gttgatccacttaggaacctc

SEQ ID NO: 23986 - RNA, 21 nt, synthetic construct
  source 1..21: mol_type = other RNA
gttgggaaggtggaagctcat

SEQ ID NO: 23987 - RNA, 21 nt, synthetic construct
  source 1..21: mol_type = other RNA
gtttacatttggtcatcgatt

SEQ ID NO: 23988 - RNA, 21 nt, synthetic construct
  source 1..21: mol_type = other RNA
gtttagaaaatcagatgggtg

SEQ ID NO: 23989 - RNA, 21 nt, synthetic construct
  source 1..21: mol_type = other RNA
gtttatgcctttctttttggt

SEQ ID NO: 23990 - RNA, 21 nt, synthetic construct
  source 1..21: mol_type = other RNA
gtttattcttcaaaatggagg

SEQ ID NO: 23991 - RNA, 21 nt, synthetic construct
  source 1..21: mol_type = other RNA
gtttccaccccttccattttt

SEQ ID NO: 23992 - RNA, 21 nt, synthetic construct
  source 1..21: mol_type = other RNA
taaaaatgcagcgcaatctcc

SEQ ID NO: 23993 - RNA, 21 nt, synthetic construct
  source 1..21: mol_type = other RNA
taaacacttggtgcctgatat

SEQ ID NO: 23994 - RNA, 21 nt, synthetic construct
  source 1..21: mol_type = other RNA
taaaccgtgacttggtatctt

SEQ ID NO: 23995 - RNA, 21 nt, synthetic construct
  source 1..21: mol_type = other RNA
taaactgtatgaagtgtctag

SEQ ID NO: 23996 - RNA, 21 nt, synthetic construct
  source 1..21: mol_type = other RNA
taaagaacataccttgggttg

SEQ ID NO: 23997 - RNA, 21 nt, synthetic construct
  source 1..21: mol_type = other RNA
taacacatcactcaagagtct

SEQ ID NO: 23998 - RNA, 21 nt, synthetic construct
  source 1..21: mol_type = other RNA
taacatctgccacgtatagag

SEQ ID NO: 23999 - RNA, 21 nt, synthetic construct
  source 1..21: mol_type = other RNA
taacatgagtaatttgatggg

SEQ ID NO: 24000 - RNA, 21 nt, synthetic construct
  source 1..21: mol_type = other RNA
taacttggtgtcaagctatat

SEQ ID NO: 24001 - RNA, 21 nt, synthetic construct
  source 1..21: mol_type = other RNA
taagagcctttctctggaggc

SEQ ID NO: 24002 - RNA, 21 nt, synthetic construct
  source 1..21: mol_type = other RNA
taaggaatgctatgagtgctg

SEQ ID NO: 24003 - RNA, 21 nt, synthetic construct
  source 1..21: mol_type = other RNA
taagtggatcaacccaaggta

SEQ ID NO: 24004 - RNA, 21 nt, synthetic construct
  source 1..21: mol_type = other RNA
taataacatctgccacgtata

SEQ ID NO: 24005 - RNA, 21 nt, synthetic construct
  source 1..21: mol_type = other RNA
taatagcccccatcaaattac

SEQ ID NO: 24006 - RNA, 21 nt, synthetic construct
  source 1..21: mol_type = other RNA
taatattgccagggtatttca

SEQ ID NO: 24007 - RNA, 21 nt, synthetic construct
  source 1..21: mol_type = other RNA
taattcctctatacatgcctt

SEQ ID NO: 24008 - RNA, 21 nt, synthetic construct
  source 1..21: mol_type = other RNA
taatttgatgggggctattat

SEQ ID NO: 24009 - RNA, 21 nt, synthetic construct
  source 1..21: mol_type = other RNA
tacacccatctgattttctaa

SEQ ID NO: 24010 - RNA, 21 nt, synthetic construct
  source 1..21: mol_type = other RNA
tacagtttagaaaatcagatg

SEQ ID NO: 24011 - RNA, 21 nt, synthetic construct
  source 1..21: mol_type = other RNA
tacatgatttggccccaagat

SEQ ID NO: 24012 - RNA, 21 nt, synthetic construct
  source 1..21: mol_type = other RNA
tacatttggtcatcgatttct

SEQ ID NO: 24013 - RNA, 21 nt, synthetic construct
  source 1..21: mol_type = other RNA
taccaagtcacggtttattct

SEQ ID NO: 24014 - RNA, 21 nt, synthetic construct
  source 1..21: mol_type = other RNA
taccctggcaatattaatgtg

SEQ ID NO: 24015 - RNA, 21 nt, synthetic construct
  source 1..21: mol_type = other RNA
taccttgggttgatccactta

SEQ ID NO: 24016 - RNA, 21 nt, synthetic construct
  source 1..21: mol_type = other RNA
tacgtggcagatgttattatc

SEQ ID NO: 24017 - RNA, 21 nt, synthetic construct
  source 1..21: mol_type = other RNA
tactagacacttcatacagtt

SEQ ID NO: 24018 - RNA, 21 nt, synthetic construct
  source 1..21: mol_type = other RNA
tactcatgttattgtactctg

SEQ ID NO: 24019 - RNA, 21 nt, synthetic construct
  source 1..21: mol_type = other RNA
tactctgtttccaccccttcc

SEQ ID NO: 24020 - RNA, 21 nt, synthetic construct
  source 1..21: mol_type = other RNA
tactgctagaaatctgctaga

SEQ ID NO: 24021 - RNA, 21 nt, synthetic construct
  source 1..21: mol_type = other RNA
tagaaaatcagatgggtgtag

SEQ ID NO: 24022 - RNA, 21 nt, synthetic construct
  source 1..21: mol_type = other RNA
tagacacttcatacagtttag

SEQ ID NO: 24023 - RNA, 21 nt, synthetic construct
  source 1..21: mol_type = other RNA
tagactcttgagtgatgtgtt

SEQ ID NO: 24024 - RNA, 21 nt, synthetic construct
  source 1..21: mol_type = other RNA
tagagcaattgctatgtccca

SEQ ID NO: 24025 - RNA, 21 nt, synthetic construct
  source 1..21: mol_type = other RNA
tagaggaattatgagggaaag

SEQ ID NO: 24026 - RNA, 21 nt, synthetic construct
  source 1..21: mol_type = other RNA
tagagtgcctgggacatagca

SEQ ID NO: 24027 - RNA, 21 nt, synthetic construct
  source 1..21: mol_type = other RNA
tagatcaaggcaggagcagga

SEQ ID NO: 24028 - RNA, 21 nt, synthetic construct
  source 1..21: mol_type = other RNA
tagcaattgctctatacgtgg

SEQ ID NO: 24029 - RNA, 21 nt, synthetic construct
  source 1..21: mol_type = other RNA
tagcagatttctagcagtatc

SEQ ID NO: 24030 - RNA, 21 nt, synthetic construct
  source 1..21: mol_type = other RNA
tagcagtatcttctgtcactg

SEQ ID NO: 24031 - RNA, 21 nt, synthetic construct
  source 1..21: mol_type = other RNA
tagcattccttaacacatcac

SEQ ID NO: 24032 - RNA, 21 nt, synthetic construct
  source 1..21: mol_type = other RNA
tagccccaagtgaaataccct

SEQ ID NO: 24033 - RNA, 21 nt, synthetic construct
  source 1..21: mol_type = other RNA
tagcccccatcaaattactca

SEQ ID NO: 24034 - RNA, 21 nt, synthetic construct
  source 1..21: mol_type = other RNA
tagcttgacaccaagttagcc

SEQ ID NO: 24035 - RNA, 21 nt, synthetic construct
  source 1..21: mol_type = other RNA
taggaacctcagataataaca

SEQ ID NO: 24036 - RNA, 21 nt, synthetic construct
  source 1..21: mol_type = other RNA
tagtagagtgcctgggacata

SEQ ID NO: 24037 - RNA, 21 nt, synthetic construct
  source 1..21: mol_type = other RNA
tagtcccaggaatcacttgaa

SEQ ID NO: 24038 - RNA, 21 nt, synthetic construct
  source 1..21: mol_type = other RNA
tatacgtggcagatgttatta

SEQ ID NO: 24039 - RNA, 21 nt, synthetic construct
  source 1..21: mol_type = other RNA
tatagagcaattgctatgtcc

SEQ ID NO: 24040 - RNA, 21 nt, synthetic construct
  source 1..21: mol_type = other RNA
tatagaggaattatgagggaa

SEQ ID NO: 24041 - RNA, 21 nt, synthetic construct
  source 1..21: mol_type = other RNA
tatagcttgacaccaagttag

SEQ ID NO: 24042 - RNA, 21 nt, synthetic construct
  source 1..21: mol_type = other RNA
tatatcaggcaccaagtgttt

SEQ ID NO: 24043 - RNA, 21 nt, synthetic construct
  source 1..21: mol_type = other RNA
tatcaggcaccaagtgtttac

SEQ ID NO: 24044 - RNA, 21 nt, synthetic construct
  source 1..21: mol_type = other RNA
tatcgggaaaagacacattaa

SEQ ID NO: 24045 - RNA, 21 nt, synthetic construct
  source 1..21: mol_type = other RNA
tatctgaggttcctaagtgga

SEQ ID NO: 24046 - RNA, 21 nt, synthetic construct
  source 1..21: mol_type = other RNA
tatcttctgtcactggagatt

SEQ ID NO: 24047 - RNA, 21 nt, synthetic construct
  source 1..21: mol_type = other RNA
tatcttggggccaaatcatgt

SEQ ID NO: 24048 - RNA, 21 nt, synthetic construct
  source 1..21: mol_type = other RNA
tatctttccctcataattcct

SEQ ID NO: 24049 - RNA, 21 nt, synthetic construct
  source 1..21: mol_type = other RNA
tatgaactgagaaatgaactt

SEQ ID NO: 24050 - RNA, 21 nt, synthetic construct
  source 1..21: mol_type = other RNA
tatgaagtgtctagtagagtg

SEQ ID NO: 24051 - RNA, 21 nt, synthetic construct
  source 1..21: mol_type = other RNA
tatgagggaaagataccaagt

SEQ ID NO: 24052 - RNA, 21 nt, synthetic construct
  source 1..21: mol_type = other RNA
tatgagtgctgagagggcatc

SEQ ID NO: 24053 - RNA, 21 nt, synthetic construct
  source 1..21: mol_type = other RNA
tatgcctttctttttggttcc

SEQ ID NO: 24054 - RNA, 21 nt, synthetic construct
  source 1..21: mol_type = other RNA
tatgtcccaggcactctacta

SEQ ID NO: 24055 - RNA, 21 nt, synthetic construct
  source 1..21: mol_type = other RNA
tattaatgtgtcttttcccga

SEQ ID NO: 24056 - RNA, 21 nt, synthetic construct
  source 1..21: mol_type = other RNA
tattatctgaggttcctaagt

SEQ ID NO: 24057 - RNA, 21 nt, synthetic construct
  source 1..21: mol_type = other RNA
tattcttcaaaatggaggtgg

SEQ ID NO: 24058 - RNA, 21 nt, synthetic construct
  source 1..21: mol_type = other RNA
tattgccagggtatttcactt

SEQ ID NO: 24059 - RNA, 21 nt, synthetic construct
  source 1..21: mol_type = other RNA
tattgtactctgtttccaccc

SEQ ID NO: 24060 - RNA, 21 nt, synthetic construct
  source 1..21: mol_type = other RNA
tatttcacttggggctaactt

SEQ ID NO: 24061 - RNA, 21 nt, synthetic construct
  source 1..21: mol_type = other RNA
tattttttgggatggaatctc

SEQ ID NO: 24062 - RNA, 21 nt, synthetic construct
  source 1..21: mol_type = other RNA
tcaaaatggaggtggcttgtt

SEQ ID NO: 24063 - RNA, 21 nt, synthetic construct
  source 1..21: mol_type = other RNA
tcaaagttcatttctcagttc

SEQ ID NO: 24064 - RNA, 21 nt, synthetic construct
  source 1..21: mol_type = other RNA
tcaacccaaggtatgttcttt

SEQ ID NO: 24065 - RNA, 21 nt, synthetic construct
  source 1..21: mol_type = other RNA
tcaagagtctacatgatttgg

SEQ ID NO: 24066 - RNA, 21 nt, synthetic construct
  source 1..21: mol_type = other RNA
tcaagctatatcaggcaccaa

SEQ ID NO: 24067 - RNA, 21 nt, synthetic construct
  source 1..21: mol_type = other RNA
tcaaggacttctgatgccctc

SEQ ID NO: 24068 - RNA, 21 nt, synthetic construct
  source 1..21: mol_type = other RNA
tcaaggcaggagcaggaacca

SEQ ID NO: 24069 - RNA, 21 nt, synthetic construct
  source 1..21: mol_type = other RNA
tcaagtgattcctgggactac

SEQ ID NO: 24070 - RNA, 21 nt, synthetic construct
  source 1..21: mol_type = other RNA
tcaccactgcacactgcactc

SEQ ID NO: 24071 - RNA, 21 nt, synthetic construct
  source 1..21: mol_type = other RNA
tcacggtttattcttcaaaat

SEQ ID NO: 24072 - RNA, 21 nt, synthetic construct
  source 1..21: mol_type = other RNA
tcactcaagagtctacatgat

SEQ ID NO: 24073 - RNA, 21 nt, synthetic construct
  source 1..21: mol_type = other RNA
tcactggagattgcgctgcat

SEQ ID NO: 24074 - RNA, 21 nt, synthetic construct
  source 1..21: mol_type = other RNA
tcacttggggctaacttggtg

SEQ ID NO: 24075 - RNA, 21 nt, synthetic construct
  source 1..21: mol_type = other RNA
tcagaagtccttgagagcctc

SEQ ID NO: 24076 - RNA, 21 nt, synthetic construct
  source 1..21: mol_type = other RNA
tcagataataacatctgccac

SEQ ID NO: 24077 - RNA, 21 nt, synthetic construct
  source 1..21: mol_type = other RNA
tcagatgggtgtagatcaagg

SEQ ID NO: 24078 - RNA, 21 nt, synthetic construct
  source 1..21: mol_type = other RNA
tcagcactcatagcattcctt

SEQ ID NO: 24079 - RNA, 21 nt, synthetic construct
  source 1..21: mol_type = other RNA
tcaggcaccaagtgtttacat

SEQ ID NO: 24080 - RNA, 21 nt, synthetic construct
  source 1..21: mol_type = other RNA
tcagttcataatagcccccat

SEQ ID NO: 24081 - RNA, 21 nt, synthetic construct
  source 1..21: mol_type = other RNA
tcataatagcccccatcaaat

SEQ ID NO: 24082 - RNA, 21 nt, synthetic construct
  source 1..21: mol_type = other RNA
tcataattcctctatacatgc

SEQ ID NO: 24083 - RNA, 21 nt, synthetic construct
  source 1..21: mol_type = other RNA
tcatacagtttagaaaatcag

SEQ ID NO: 24084 - RNA, 21 nt, synthetic construct
  source 1..21: mol_type = other RNA
tcatagcattccttaacacat

SEQ ID NO: 24085 - RNA, 21 nt, synthetic construct
  source 1..21: mol_type = other RNA
tcatcgatttctcccaattcc

SEQ ID NO: 24086 - RNA, 21 nt, synthetic construct
  source 1..21: mol_type = other RNA
tcatgtagactcttgagtgat

SEQ ID NO: 24087 - RNA, 21 nt, synthetic construct
  source 1..21: mol_type = other RNA
tcatgttattgtactctgttt

SEQ ID NO: 24088 - RNA, 21 nt, synthetic construct
  source 1..21: mol_type = other RNA
tcatttctcagttcataatag

SEQ ID NO: 24089 - RNA, 21 nt, synthetic construct
  source 1..21: mol_type = other RNA
tcatttggccagagtggaaat

SEQ ID NO: 24090 - RNA, 21 nt, synthetic construct
  source 1..21: mol_type = other RNA
tccaccttcccaacaagccac

SEQ ID NO: 24091 - RNA, 21 nt, synthetic construct
  source 1..21: mol_type = other RNA
tccactctggccaaatgagct

SEQ ID NO: 24092 - RNA, 21 nt, synthetic construct
  source 1..21: mol_type = other RNA
tccacttaggaacctcagata

SEQ ID NO: 24093 - RNA, 21 nt, synthetic construct
  source 1..21: mol_type = other RNA
tccagagaaaggctcttaaaa

SEQ ID NO: 24094 - RNA, 21 nt, synthetic construct
  source 1..21: mol_type = other RNA
tccagcctgggcaatggaatg

SEQ ID NO: 24095 - RNA, 21 nt, synthetic construct
  source 1..21: mol_type = other RNA
tccagtgacagaagatactgc

SEQ ID NO: 24096 - RNA, 21 nt, synthetic construct
  source 1..21: mol_type = other RNA
tccattgcccaggctggagtg

SEQ ID NO: 24097 - RNA, 21 nt, synthetic construct
  source 1..21: mol_type = other RNA
tccatttccactctggccaaa

SEQ ID NO: 24098 - RNA, 21 nt, synthetic construct
  source 1..21: mol_type = other RNA
tccattttgaagaataaaccg

SEQ ID NO: 24099 - RNA, 21 nt, synthetic construct
  source 1..21: mol_type = other RNA
tcccaacaagccacctccatt

SEQ ID NO: 24100 - RNA, 21 nt, synthetic construct
  source 1..21: mol_type = other RNA
tcccaacttcaagtgatcagc

SEQ ID NO: 24101 - RNA, 21 nt, synthetic construct
  source 1..21: mol_type = other RNA
tcccaattccatttccactct

SEQ ID NO: 24102 - RNA, 21 nt, synthetic construct
  source 1..21: mol_type = other RNA
tcccaggaatcacttgaaccc

SEQ ID NO: 24103 - RNA, 21 nt, synthetic construct
  source 1..21: mol_type = other RNA
tcccaggcactctactagaca

SEQ ID NO: 24104 - RNA, 21 nt, synthetic construct
  source 1..21: mol_type = other RNA
tccctcataattcctctatac

SEQ ID NO: 24105 - RNA, 21 nt, synthetic construct
  source 1..21: mol_type = other RNA
tcctaagtggatcaacccaag

SEQ ID NO: 24106 - RNA, 21 nt, synthetic construct
  source 1..21: mol_type = other RNA
tcctctatacatgcctttttt

SEQ ID NO: 24107 - RNA, 21 nt, synthetic construct
  source 1..21: mol_type = other RNA
tcctgccttgatctacaccca

SEQ ID NO: 24108 - RNA, 21 nt, synthetic construct
  source 1..21: mol_type = other RNA
tcctgctcctgccttgatcta

SEQ ID NO: 24109 - RNA, 21 nt, synthetic construct
  source 1..21: mol_type = other RNA
tcctgggttcaagtgattcct

SEQ ID NO: 24110 - RNA, 21 nt, synthetic construct
  source 1..21: mol_type = other RNA
tccttaacacatcactcaaga

SEQ ID NO: 24111 - RNA, 21 nt, synthetic construct
  source 1..21: mol_type = other RNA
tccttgagagcctccagagaa

SEQ ID NO: 24112 - RNA, 21 nt, synthetic construct
  source 1..21: mol_type = other RNA
tcgatgaccaaatgtaaacac

SEQ ID NO: 24113 - RNA, 21 nt, synthetic construct
  source 1..21: mol_type = other RNA
tcgatttctcccaattccatt

SEQ ID NO: 24114 - RNA, 21 nt, synthetic construct
  source 1..21: mol_type = other RNA
tcgggaaaagacacattaata

SEQ ID NO: 24115 - RNA, 21 nt, synthetic construct
  source 1..21: mol_type = other RNA
tctaaactgtatgaagtgtct

SEQ ID NO: 24116 - RNA, 21 nt, synthetic construct
  source 1..21: mol_type = other RNA
tctacacccatctgattttct

SEQ ID NO: 24117 - RNA, 21 nt, synthetic construct
  source 1..21: mol_type = other RNA
tctacatgatttggccccaag

SEQ ID NO: 24118 - RNA, 21 nt, synthetic construct
  source 1..21: mol_type = other RNA
tctactagacacttcatacag

SEQ ID NO: 24119 - RNA, 21 nt, synthetic construct
  source 1..21: mol_type = other RNA
tctagcagatttctagcagta

SEQ ID NO: 24120 - RNA, 21 nt, synthetic construct
  source 1..21: mol_type = other RNA
tctagcagtatcttctgtcac

SEQ ID NO: 24121 - RNA, 21 nt, synthetic construct
  source 1..21: mol_type = other RNA
tctagtagagtgcctgggaca

SEQ ID NO: 24122 - RNA, 21 nt, synthetic construct
  source 1..21: mol_type = other RNA
tctatacatgccttttttgtt

SEQ ID NO: 24123 - RNA, 21 nt, synthetic construct
  source 1..21: mol_type = other RNA
tctatacgtggcagatgttat

SEQ ID NO: 24124 - RNA, 21 nt, synthetic construct
  source 1..21: mol_type = other RNA
tctcaaggacttctgatgccc

SEQ ID NO: 24125 - RNA, 21 nt, synthetic construct
  source 1..21: mol_type = other RNA
tctcaccactgcacactgcac

SEQ ID NO: 24126 - RNA, 21 nt, synthetic construct
  source 1..21: mol_type = other RNA
tctcagcactcatagcattcc

SEQ ID NO: 24127 - RNA, 21 nt, synthetic construct
  source 1..21: mol_type = other RNA
tctcagttcataatagccccc

SEQ ID NO: 24128 - RNA, 21 nt, synthetic construct
  source 1..21: mol_type = other RNA
tctccagtgacagaagatact

SEQ ID NO: 24129 - RNA, 21 nt, synthetic construct
  source 1..21: mol_type = other RNA
tctcccaattccatttccact

SEQ ID NO: 24130 - RNA, 21 nt, synthetic construct
  source 1..21: mol_type = other RNA
tctctggaggctctcaaggac

SEQ ID NO: 24131 - RNA, 21 nt, synthetic construct
  source 1..21: mol_type = other RNA
tctgaggttcctaagtggatc

SEQ ID NO: 24132 - RNA, 21 nt, synthetic construct
  source 1..21: mol_type = other RNA
tctgatgccctctcagcactc

SEQ ID NO: 24133 - RNA, 21 nt, synthetic construct
  source 1..21: mol_type = other RNA
tctgattttctaaactgtatg

SEQ ID NO: 24134 - RNA, 21 nt, synthetic construct
  source 1..21: mol_type = other RNA
tctgccacgtatagagcaatt

SEQ ID NO: 24135 - RNA, 21 nt, synthetic construct
  source 1..21: mol_type = other RNA
tctggaggctctcaaggactt

SEQ ID NO: 24136 - RNA, 21 nt, synthetic construct
  source 1..21: mol_type = other RNA
tctggccaaatgagcttccac

SEQ ID NO: 24137 - RNA, 21 nt, synthetic construct
  source 1..21: mol_type = other RNA
tctgtcactggagattgcgct

SEQ ID NO: 24138 - RNA, 21 nt, synthetic construct
  source 1..21: mol_type = other RNA
tctgtttccaccccttccatt

SEQ ID NO: 24139 - RNA, 21 nt, synthetic construct
  source 1..21: mol_type = other RNA
tcttaaaaatgcagcgcaatc

SEQ ID NO: 24140 - RNA, 21 nt, synthetic construct
  source 1..21: mol_type = other RNA
tcttatgtttatgcctttctt

SEQ ID NO: 24141 - RNA, 21 nt, synthetic construct
  source 1..21: mol_type = other RNA
tcttcaaaatggaggtggctt

SEQ ID NO: 24142 - RNA, 21 nt, synthetic construct
  source 1..21: mol_type = other RNA
tcttctgtcactggagattgc

SEQ ID NO: 24143 - RNA, 21 nt, synthetic construct
  source 1..21: mol_type = other RNA
tcttgaactcccaacttcaag

SEQ ID NO: 24144 - RNA, 21 nt, synthetic construct
  source 1..21: mol_type = other RNA
tcttgagtgatgtgttaagga

SEQ ID NO: 24145 - RNA, 21 nt, synthetic construct
  source 1..21: mol_type = other RNA
tcttggggccaaatcatgtag

SEQ ID NO: 24146 - RNA, 21 nt, synthetic construct
  source 1..21: mol_type = other RNA
tctttccctcataattcctct

SEQ ID NO: 24147 - RNA, 21 nt, synthetic construct
  source 1..21: mol_type = other RNA
tctttttggttcctgctcctg

SEQ ID NO: 24148 - RNA, 21 nt, synthetic construct
  source 1..21: mol_type = other RNA
tgaaaagtatcttggggccaa

SEQ ID NO: 24149 - RNA, 21 nt, synthetic construct
  source 1..21: mol_type = other RNA
tgaaataccctggcaatatta

SEQ ID NO: 24150 - RNA, 21 nt, synthetic construct
  source 1..21: mol_type = other RNA
tgaactcccaacttcaagtga

SEQ ID NO: 24151 - RNA, 21 nt, synthetic construct
  source 1..21: mol_type = other RNA
tgaactgagaaatgaactttg

SEQ ID NO: 24152 - RNA, 21 nt, synthetic construct
  source 1..21: mol_type = other RNA
tgaactttgaaaagtatcttg

SEQ ID NO: 24153 - RNA, 21 nt, synthetic construct
  source 1..21: mol_type = other RNA
tgaagaataaaccgtgacttg

SEQ ID NO: 24154 - RNA, 21 nt, synthetic construct
  source 1..21: mol_type = other RNA
tgaagtgtctagtagagtgcc

SEQ ID NO: 24155 - RNA, 21 nt, synthetic construct
  source 1..21: mol_type = other RNA
tgacaccaagttagccccaag

SEQ ID NO: 24156 - RNA, 21 nt, synthetic construct
  source 1..21: mol_type = other RNA
tgacagaagatactgctagaa

SEQ ID NO: 24157 - RNA, 21 nt, synthetic construct
  source 1..21: mol_type = other RNA
tgaccaaatgtaaacacttgg

SEQ ID NO: 24158 - RNA, 21 nt, synthetic construct
  source 1..21: mol_type = other RNA
tgacttggtatctttccctca

SEQ ID NO: 24159 - RNA, 21 nt, synthetic construct
  source 1..21: mol_type = other RNA
tgagaaatgaactttgaaaag

SEQ ID NO: 24160 - RNA, 21 nt, synthetic construct
  source 1..21: mol_type = other RNA
tgagagcctccagagaaaggc

SEQ ID NO: 24161 - RNA, 21 nt, synthetic construct
  source 1..21: mol_type = other RNA
tgagagggcatcagaagtcct

SEQ ID NO: 24162 - RNA, 21 nt, synthetic construct
  source 1..21: mol_type = other RNA
tgagatctcaccactgcacac

SEQ ID NO: 24163 - RNA, 21 nt, synthetic construct
  source 1..21: mol_type = other RNA
tgagattccatcccaaaaaat

SEQ ID NO: 24164 - RNA, 21 nt, synthetic construct
  source 1..21: mol_type = other RNA
tgagctgagatctcaccactg

SEQ ID NO: 24165 - RNA, 21 nt, synthetic construct
  source 1..21: mol_type = other RNA
tgagcttccaccttcccaaca

SEQ ID NO: 24166 - RNA, 21 nt, synthetic construct
  source 1..21: mol_type = other RNA
tgaggaatatcgggaaaagac

SEQ ID NO: 24167 - RNA, 21 nt, synthetic construct
  source 1..21: mol_type = other RNA
tgagggaaagataccaagtca

SEQ ID NO: 24168 - RNA, 21 nt, synthetic construct
  source 1..21: mol_type = other RNA
tgaggttcctaagtggatcaa

SEQ ID NO: 24169 - RNA, 21 nt, synthetic construct
  source 1..21: mol_type = other RNA
tgagtaatttgatgggggcta

SEQ ID NO: 24170 - RNA, 21 nt, synthetic construct
  source 1..21: mol_type = other RNA
tgagtgatgtgttaaggaatg

SEQ ID NO: 24171 - RNA, 21 nt, synthetic construct
  source 1..21: mol_type = other RNA
tgagtgctgagagggcatcag

SEQ ID NO: 24172 - RNA, 21 nt, synthetic construct
  source 1..21: mol_type = other RNA
tgatatagcttgacaccaagt

SEQ ID NO: 24173 - RNA, 21 nt, synthetic construct
  source 1..21: mol_type = other RNA
tgatcacttgaagttgggagt

SEQ ID NO: 24174 - RNA, 21 nt, synthetic construct
  source 1..21: mol_type = other RNA
tgatccacttaggaacctcag

SEQ ID NO: 24175 - RNA, 21 nt, synthetic construct
  source 1..21: mol_type = other RNA
tgatctacacccatctgattt

SEQ ID NO: 24176 - RNA, 21 nt, synthetic construct
  source 1..21: mol_type = other RNA
tgatgccctctcagcactcat

SEQ ID NO: 24177 - RNA, 21 nt, synthetic construct
  source 1..21: mol_type = other RNA
tgatgggggctattatgaact

SEQ ID NO: 24178 - RNA, 21 nt, synthetic construct
  source 1..21: mol_type = other RNA
tgatgtgttaaggaatgctat

SEQ ID NO: 24179 - RNA, 21 nt, synthetic construct
  source 1..21: mol_type = other RNA
tgattcctgggactacaggca

SEQ ID NO: 24180 - RNA, 21 nt, synthetic construct
  source 1..21: mol_type = other RNA
tgatttggccccaagatactt

SEQ ID NO: 24181 - RNA, 21 nt, synthetic construct
  source 1..21: mol_type = other RNA
tgcacactgcactccagcctg

SEQ ID NO: 24182 - RNA, 21 nt, synthetic construct
  source 1..21: mol_type = other RNA
tgcagcgcaatctccagtgac

SEQ ID NO: 24183 - RNA, 21 nt, synthetic construct
  source 1..21: mol_type = other RNA
tgcagtgtgcagtggtgagat

SEQ ID NO: 24184 - RNA, 21 nt, synthetic construct
  source 1..21: mol_type = other RNA
tgcatttttaagagcctttct

SEQ ID NO: 24185 - RNA, 21 nt, synthetic construct
  source 1..21: mol_type = other RNA
tgccacgtatagagcaattgc

SEQ ID NO: 24186 - RNA, 21 nt, synthetic construct
  source 1..21: mol_type = other RNA
tgccagggtatttcacttggg

SEQ ID NO: 24187 - RNA, 21 nt, synthetic construct
  source 1..21: mol_type = other RNA
tgccctctcagcactcatagc

SEQ ID NO: 24188 - RNA, 21 nt, synthetic construct
  source 1..21: mol_type = other RNA
tgcctgatatagcttgacacc

SEQ ID NO: 24189 - RNA, 21 nt, synthetic construct
  source 1..21: mol_type = other RNA
tgcctgggacatagcaattgc

SEQ ID NO: 24190 - RNA, 21 nt, synthetic construct
  source 1..21: mol_type = other RNA
tgcctgtagtcccaggaatca

SEQ ID NO: 24191 - RNA, 21 nt, synthetic construct
  source 1..21: mol_type = other RNA
tgccttgatctacacccatct

SEQ ID NO: 24192 - RNA, 21 nt, synthetic construct
  source 1..21: mol_type = other RNA
tgcctttctttttggttcctg

SEQ ID NO: 24193 - RNA, 21 nt, synthetic construct
  source 1..21: mol_type = other RNA
tgcgctgcatttttaagagcc

SEQ ID NO: 24194 - RNA, 21 nt, synthetic construct
  source 1..21: mol_type = other RNA
tgctagaaatctgctagaaaa

SEQ ID NO: 24195 - RNA, 21 nt, synthetic construct
  source 1..21: mol_type = other RNA
tgctatgagtgctgagagggc

SEQ ID NO: 24196 - RNA, 21 nt, synthetic construct
  source 1..21: mol_type = other RNA
tgctatgtcccaggcactcta

SEQ ID NO: 24197 - RNA, 21 nt, synthetic construct
  source 1..21: mol_type = other RNA
tgctcctgccttgatctacac

SEQ ID NO: 24198 - RNA, 21 nt, synthetic construct
  source 1..21: mol_type = other RNA
tgctctatacgtggcagatgt

SEQ ID NO: 24199 - RNA, 21 nt, synthetic construct
  source 1..21: mol_type = other RNA
tgctgagagggcatcagaagt

SEQ ID NO: 24200 - RNA, 21 nt, synthetic construct
  source 1..21: mol_type = other RNA
tggaaacagagtacaataaca

SEQ ID NO: 24201 - RNA, 21 nt, synthetic construct
  source 1..21: mol_type = other RNA
tggaaatggaattgggagaaa

SEQ ID NO: 24202 - RNA, 21 nt, synthetic construct
  source 1..21: mol_type = other RNA
tggaagctcatttggccagag

SEQ ID NO: 24203 - RNA, 21 nt, synthetic construct
  source 1..21: mol_type = other RNA
tggaaggggtggaaacagagt

SEQ ID NO: 24204 - RNA, 21 nt, synthetic construct
  source 1..21: mol_type = other RNA
tggaatctcattccattgccc

SEQ ID NO: 24205 - RNA, 21 nt, synthetic construct
  source 1..21: mol_type = other RNA
tggaatgagattccatcccaa

SEQ ID NO: 24206 - RNA, 21 nt, synthetic construct
  source 1..21: mol_type = other RNA
tggaattgggagaaatcgatg

SEQ ID NO: 24207 - RNA, 21 nt, synthetic construct
  source 1..21: mol_type = other RNA
tggagattgcgctgcattttt

SEQ ID NO: 24208 - RNA, 21 nt, synthetic construct
  source 1..21: mol_type = other RNA
tggaggctctcaaggacttct

SEQ ID NO: 24209 - RNA, 21 nt, synthetic construct
  source 1..21: mol_type = other RNA
tggaggtggcttgttgggaag

SEQ ID NO: 24210 - RNA, 21 nt, synthetic construct
  source 1..21: mol_type = other RNA
tggagtgcagtgtgcagtggt

SEQ ID NO: 24211 - RNA, 21 nt, synthetic construct
  source 1..21: mol_type = other RNA
tggatcaacccaaggtatgtt

SEQ ID NO: 24212 - RNA, 21 nt, synthetic construct
  source 1..21: mol_type = other RNA
tggcaatattaatgtgtcttt

SEQ ID NO: 24213 - RNA, 21 nt, synthetic construct
  source 1..21: mol_type = other RNA
tggcagatgttattatctgag

SEQ ID NO: 24214 - RNA, 21 nt, synthetic construct
  source 1..21: mol_type = other RNA
tggccaaatgagcttccacct

SEQ ID NO: 24215 - RNA, 21 nt, synthetic construct
  source 1..21: mol_type = other RNA
tggccagagtggaaatggaat

SEQ ID NO: 24216 - RNA, 21 nt, synthetic construct
  source 1..21: mol_type = other RNA
tggccccaagatacttttcaa

SEQ ID NO: 24217 - RNA, 21 nt, synthetic construct
  source 1..21: mol_type = other RNA
tggcttgttgggaaggtggaa

SEQ ID NO: 24218 - RNA, 21 nt, synthetic construct
  source 1..21: mol_type = other RNA
tgggaaggtggaagctcattt

SEQ ID NO: 24219 - RNA, 21 nt, synthetic construct
  source 1..21: mol_type = other RNA
tgggacatagcaattgctcta

SEQ ID NO: 24220 - RNA, 21 nt, synthetic construct
  source 1..21: mol_type = other RNA
tgggagaaatcgatgaccaaa

SEQ ID NO: 24221 - RNA, 21 nt, synthetic construct
  source 1..21: mol_type = other RNA
tgggatggaatctcattccat

SEQ ID NO: 24222 - RNA, 21 nt, synthetic construct
  source 1..21: mol_type = other RNA
tgggcaatggaatgagattcc

SEQ ID NO: 24223 - RNA, 21 nt, synthetic construct
  source 1..21: mol_type = other RNA
tggggccaaatcatgtagact

SEQ ID NO: 24224 - RNA, 21 nt, synthetic construct
  source 1..21: mol_type = other RNA
tggggctaacttggtgtcaag

SEQ ID NO: 24225 - RNA, 21 nt, synthetic construct
  source 1..21: mol_type = other RNA
tgggggctattatgaactgag

SEQ ID NO: 24226 - RNA, 21 nt, synthetic construct
  source 1..21: mol_type = other RNA
tgggtgtagatcaaggcagga

SEQ ID NO: 24227 - RNA, 21 nt, synthetic construct
  source 1..21: mol_type = other RNA
tgggttcaagtgattcctggg

SEQ ID NO: 24228 - RNA, 21 nt, synthetic construct
  source 1..21: mol_type = other RNA
tgggttgatccacttaggaac

SEQ ID NO: 24229 - RNA, 21 nt, synthetic construct
  source 1..21: mol_type = other RNA
tggtatctttccctcataatt

SEQ ID NO: 24230 - RNA, 21 nt, synthetic construct
  source 1..21: mol_type = other RNA
tggtcatcgatttctcccaat

SEQ ID NO: 24231 - RNA, 21 nt, synthetic construct
  source 1..21: mol_type = other RNA
tggtgcctgatatagcttgac

SEQ ID NO: 24232 - RNA, 21 nt, synthetic construct
  source 1..21: mol_type = other RNA
tggtggtgtgtgcctgtagtc

SEQ ID NO: 24233 - RNA, 21 nt, synthetic construct
  source 1..21: mol_type = other RNA
tggtgtcaagctatatcaggc

SEQ ID NO: 24234 - RNA, 21 nt, synthetic construct
  source 1..21: mol_type = other RNA
tggtgtgtgcctgtagtccca

SEQ ID NO: 24235 - RNA, 21 nt, synthetic construct
  source 1..21: mol_type = other RNA
tggttcctgctcctgccttga

SEQ ID NO: 24236 - RNA, 21 nt, synthetic construct
  source 1..21: mol_type = other RNA
tgtaaacacttggtgcctgat

SEQ ID NO: 24237 - RNA, 21 nt, synthetic construct
  source 1..21: mol_type = other RNA
tgtactctgtttccacccctt

SEQ ID NO: 24238 - RNA, 21 nt, synthetic construct
  source 1..21: mol_type = other RNA
tgtagactcttgagtgatgtg

SEQ ID NO: 24239 - RNA, 21 nt, synthetic construct
  source 1..21: mol_type = other RNA
tgtagatcaaggcaggagcag

SEQ ID NO: 24240 - RNA, 21 nt, synthetic construct
  source 1..21: mol_type = other RNA
tgtagtcccaggaatcacttg

SEQ ID NO: 24241 - RNA, 21 nt, synthetic construct
  source 1..21: mol_type = other RNA
tgtatagaggaattatgaggg

SEQ ID NO: 24242 - RNA, 21 nt, synthetic construct
  source 1..21: mol_type = other RNA
tgtatgaagtgtctagtagag

SEQ ID NO: 24243 - RNA, 21 nt, synthetic construct
  source 1..21: mol_type = other RNA
tgtcaagctatatcaggcacc

SEQ ID NO: 24244 - RNA, 21 nt, synthetic construct
  source 1..21: mol_type = other RNA
tgtcactggagattgcgctgc

SEQ ID NO: 24245 - RNA, 21 nt, synthetic construct
  source 1..21: mol_type = other RNA
tgtcccaggcactctactaga

SEQ ID NO: 24246 - RNA, 21 nt, synthetic construct
  source 1..21: mol_type = other RNA
tgtctagtagagtgcctggga

SEQ ID NO: 24247 - RNA, 21 nt, synthetic construct
  source 1..21: mol_type = other RNA
tgtgcagtggtgagatctcag

SEQ ID NO: 24248 - RNA, 21 nt, synthetic construct
  source 1..21: mol_type = other RNA
tgtgcctgtagtcccaggaat

SEQ ID NO: 24249 - RNA, 21 nt, synthetic construct
  source 1..21: mol_type = other RNA
tgtgtgcctgtagtcccagga

SEQ ID NO: 24250 - RNA, 21 nt, synthetic construct
  source 1..21: mol_type = other RNA
tgtgttaaggaatgctatgag

SEQ ID NO: 24251 - RNA, 21 nt, synthetic construct
  source 1..21: mol_type = other RNA
tgttaaggaatgctatgagtg

SEQ ID NO: 24252 - RNA, 21 nt, synthetic construct
  source 1..21: mol_type = other RNA
tgttattatctgaggttccta

SEQ ID NO: 24253 - RNA, 21 nt, synthetic construct
  source 1..21: mol_type = other RNA
tgttattgtactctgtttcca

SEQ ID NO: 24254 - RNA, 21 nt, synthetic construct
  source 1..21: mol_type = other RNA
tgttgggaaggtggaagctca

SEQ ID NO: 24255 - RNA, 21 nt, synthetic construct
  source 1..21: mol_type = other RNA
tgtttacatttggtcatcgat

SEQ ID NO: 24256 - RNA, 21 nt, synthetic construct
  source 1..21: mol_type = other RNA
tgtttatgcctttctttttgg

SEQ ID NO: 24257 - RNA, 21 nt, synthetic construct
  source 1..21: mol_type = other RNA
tgtttccaccccttccatttt

SEQ ID NO: 24258 - RNA, 21 nt, synthetic construct
  source 1..21: mol_type = other RNA
ttaaaaatgcagcgcaatctc

SEQ ID NO: 24259 - RNA, 21 nt, synthetic construct
  source 1..21: mol_type = other RNA
ttaacacatcactcaagagtc

SEQ ID NO: 24260 - RNA, 21 nt, synthetic construct
  source 1..21: mol_type = other RNA
ttaagagcctttctctggagg

SEQ ID NO: 24261 - RNA, 21 nt, synthetic construct
  source 1..21: mol_type = other RNA
ttaaggaatgctatgagtgct

SEQ ID NO: 24262 - RNA, 21 nt, synthetic construct
  source 1..21: mol_type = other RNA
ttaatattgccagggtatttc

SEQ ID NO: 24263 - RNA, 21 nt, synthetic construct
  source 1..21: mol_type = other RNA
ttaatgtgtcttttcccgata

SEQ ID NO: 24264 - RNA, 21 nt, synthetic construct
  source 1..21: mol_type = other RNA
ttacatttggtcatcgatttc

SEQ ID NO: 24265 - RNA, 21 nt, synthetic construct
  source 1..21: mol_type = other RNA
ttactcatgttattgtactct

SEQ ID NO: 24266 - RNA, 21 nt, synthetic construct
  source 1..21: mol_type = other RNA
ttagaaaatcagatgggtgta

SEQ ID NO: 24267 - RNA, 21 nt, synthetic construct
  source 1..21: mol_type = other RNA
ttagccccaagtgaaataccc

SEQ ID NO: 24268 - RNA, 21 nt, synthetic construct
  source 1..21: mol_type = other RNA
ttaggaacctcagataataac

SEQ ID NO: 24269 - RNA, 21 nt, synthetic construct
  source 1..21: mol_type = other RNA
ttatctgaggttcctaagtgg

SEQ ID NO: 24270 - RNA, 21 nt, synthetic construct
  source 1..21: mol_type = other RNA
ttatgaactgagaaatgaact

SEQ ID NO: 24271 - RNA, 21 nt, synthetic construct
  source 1..21: mol_type = other RNA
ttatgagggaaagataccaag

SEQ ID NO: 24272 - RNA, 21 nt, synthetic construct
  source 1..21: mol_type = other RNA
ttatgcctttctttttggttc

SEQ ID NO: 24273 - RNA, 21 nt, synthetic construct
  source 1..21: mol_type = other RNA
ttattatctgaggttcctaag

SEQ ID NO: 24274 - RNA, 21 nt, synthetic construct
  source 1..21: mol_type = other RNA
ttattcttcaaaatggaggtg

SEQ ID NO: 24275 - RNA, 21 nt, synthetic construct
  source 1..21: mol_type = other RNA
ttattgtactctgtttccacc

SEQ ID NO: 24276 - RNA, 21 nt, synthetic construct
  source 1..21: mol_type = other RNA
ttattttttgggatggaatct

SEQ ID NO: 24277 - RNA, 21 nt, synthetic construct
  source 1..21: mol_type = other RNA
ttcaaaatggaggtggcttgt

SEQ ID NO: 24278 - RNA, 21 nt, synthetic construct
  source 1..21: mol_type = other RNA
ttcaaagttcatttctcagtt

SEQ ID NO: 24279 - RNA, 21 nt, synthetic construct
  source 1..21: mol_type = other RNA
ttcaagtgattcctgggacta

SEQ ID NO: 24280 - RNA, 21 nt, synthetic construct
  source 1..21: mol_type = other RNA
ttcacttggggctaacttggt

SEQ ID NO: 24281 - RNA, 21 nt, synthetic construct
  source 1..21: mol_type = other RNA
ttcataatagcccccatcaaa

SEQ ID NO: 24282 - RNA, 21 nt, synthetic construct
  source 1..21: mol_type = other RNA
ttccaccttcccaacaagcca

SEQ ID NO: 24283 - RNA, 21 nt, synthetic construct
  source 1..21: mol_type = other RNA
ttccactctggccaaatgagc

SEQ ID NO: 24284 - RNA, 21 nt, synthetic construct
  source 1..21: mol_type = other RNA
ttccattgcccaggctggagt

SEQ ID NO: 24285 - RNA, 21 nt, synthetic construct
  source 1..21: mol_type = other RNA
ttccatttccactctggccaa

SEQ ID NO: 24286 - RNA, 21 nt, synthetic construct
  source 1..21: mol_type = other RNA
ttcccaacaagccacctccat

SEQ ID NO: 24287 - RNA, 21 nt, synthetic construct
  source 1..21: mol_type = other RNA
ttccctcataattcctctata

SEQ ID NO: 24288 - RNA, 21 nt, synthetic construct
  source 1..21: mol_type = other RNA
ttcctaagtggatcaacccaa

SEQ ID NO: 24289 - RNA, 21 nt, synthetic construct
  source 1..21: mol_type = other RNA
ttcctctatacatgccttttt

SEQ ID NO: 24290 - RNA, 21 nt, synthetic construct
  source 1..21: mol_type = other RNA
ttcctgctcctgccttgatct

SEQ ID NO: 24291 - RNA, 21 nt, synthetic construct
  source 1..21: mol_type = other RNA
ttcctgggactacaggcacac

SEQ ID NO: 24292 - RNA, 21 nt, synthetic construct
  source 1..21: mol_type = other RNA
ttccttaacacatcactcaag

SEQ ID NO: 24293 - RNA, 21 nt, synthetic construct
  source 1..21: mol_type = other RNA
ttctaaactgtatgaagtgtc

SEQ ID NO: 24294 - RNA, 21 nt, synthetic construct
  source 1..21: mol_type = other RNA
ttctagcagatttctagcagt

SEQ ID NO: 24295 - RNA, 21 nt, synthetic construct
  source 1..21: mol_type = other RNA
ttctagcagtatcttctgtca

SEQ ID NO: 24296 - RNA, 21 nt, synthetic construct
  source 1..21: mol_type = other RNA
ttctcagttcataatagcccc

SEQ ID NO: 24297 - RNA, 21 nt, synthetic construct
  source 1..21: mol_type = other RNA
ttctcccaattccatttccac

SEQ ID NO: 24298 - RNA, 21 nt, synthetic construct
  source 1..21: mol_type = other RNA
ttctctggaggctctcaagga

SEQ ID NO: 24299 - RNA, 21 nt, synthetic construct
  source 1..21: mol_type = other RNA
ttctgatgccctctcagcact

SEQ ID NO: 24300 - RNA, 21 nt, synthetic construct
  source 1..21: mol_type = other RNA
ttctgtcactggagattgcgc

SEQ ID NO: 24301 - RNA, 21 nt, synthetic construct
  source 1..21: mol_type = other RNA
ttcttatgtttatgcctttct

SEQ ID NO: 24302 - RNA, 21 nt, synthetic construct
  source 1..21: mol_type = other RNA
ttcttcaaaatggaggtggct

SEQ ID NO: 24303 - RNA, 21 nt, synthetic construct
  source 1..21: mol_type = other RNA
ttctttttggttcctgctcct

SEQ ID NO: 24304 - RNA, 21 nt, synthetic construct
  source 1..21: mol_type = other RNA
ttgaaaagtatcttggggcca

SEQ ID NO: 24305 - RNA, 21 nt, synthetic construct
  source 1..21: mol_type = other RNA
ttgaactcccaacttcaagtg

SEQ ID NO: 24306 - RNA, 21 nt, synthetic construct
  source 1..21: mol_type = other RNA
ttgaagaataaaccgtgactt

SEQ ID NO: 24307 - RNA, 21 nt, synthetic construct
  source 1..21: mol_type = other RNA
ttgacaccaagttagccccaa

SEQ ID NO: 24308 - RNA, 21 nt, synthetic construct
  source 1..21: mol_type = other RNA
ttgagagcctccagagaaagg

SEQ ID NO: 24309 - RNA, 21 nt, synthetic construct
  source 1..21: mol_type = other RNA
ttgagtgatgtgttaaggaat

SEQ ID NO: 24310 - RNA, 21 nt, synthetic construct
  source 1..21: mol_type = other RNA
ttgatccacttaggaacctca

SEQ ID NO: 24311 - RNA, 21 nt, synthetic construct
  source 1..21: mol_type = other RNA
ttgatctacacccatctgatt

SEQ ID NO: 24312 - RNA, 21 nt, synthetic construct
  source 1..21: mol_type = other RNA
ttgatgggggctattatgaac

SEQ ID NO: 24313 - RNA, 21 nt, synthetic construct
  source 1..21: mol_type = other RNA
ttgccagggtatttcacttgg

SEQ ID NO: 24314 - RNA, 21 nt, synthetic construct
  source 1..21: mol_type = other RNA
ttgcgctgcatttttaagagc

SEQ ID NO: 24315 - RNA, 21 nt, synthetic construct
  source 1..21: mol_type = other RNA
ttgctatgtcccaggcactct

SEQ ID NO: 24316 - RNA, 21 nt, synthetic construct
  source 1..21: mol_type = other RNA
ttgctctatacgtggcagatg

SEQ ID NO: 24317 - RNA, 21 nt, synthetic construct
  source 1..21: mol_type = other RNA
ttggccagagtggaaatggaa

SEQ ID NO: 24318 - RNA, 21 nt, synthetic construct
  source 1..21: mol_type = other RNA
ttggccccaagatacttttca

SEQ ID NO: 24319 - RNA, 21 nt, synthetic construct
  source 1..21: mol_type = other RNA
ttgggaaggtggaagctcatt

SEQ ID NO: 24320 - RNA, 21 nt, synthetic construct
  source 1..21: mol_type = other RNA
ttgggagaaatcgatgaccaa

SEQ ID NO: 24321 - RNA, 21 nt, synthetic construct
  source 1..21: mol_type = other RNA
ttgggatggaatctcattcca

SEQ ID NO: 24322 - RNA, 21 nt, synthetic construct
  source 1..21: mol_type = other RNA
ttggggccaaatcatgtagac

SEQ ID NO: 24323 - RNA, 21 nt, synthetic construct
  source 1..21: mol_type = other RNA
ttggggctaacttggtgtcaa

SEQ ID NO: 24324 - RNA, 21 nt, synthetic construct
  source 1..21: mol_type = other RNA
ttgggttgatccacttaggaa

SEQ ID NO: 24325 - RNA, 21 nt, synthetic construct
  source 1..21: mol_type = other RNA
ttggtatctttccctcataat

SEQ ID NO: 24326 - RNA, 21 nt, synthetic construct
  source 1..21: mol_type = other RNA
ttggtcatcgatttctcccaa

SEQ ID NO: 24327 - RNA, 21 nt, synthetic construct
  source 1..21: mol_type = other RNA
ttggtgcctgatatagcttga

SEQ ID NO: 24328 - RNA, 21 nt, synthetic construct
  source 1..21: mol_type = other RNA
ttggtgtcaagctatatcagg

SEQ ID NO: 24329 - RNA, 21 nt, synthetic construct
  source 1..21: mol_type = other RNA
ttggttcctgctcctgccttg

SEQ ID NO: 24330 - RNA, 21 nt, synthetic construct
  source 1..21: mol_type = other RNA
ttgtactctgtttccacccct

SEQ ID NO: 24331 - RNA, 21 nt, synthetic construct
  source 1..21: mol_type = other RNA
ttgttgggaaggtggaagctc

SEQ ID NO: 24332 - RNA, 21 nt, synthetic construct
  source 1..21: mol_type = other RNA
tttaagagcctttctctggag

SEQ ID NO: 24333 - RNA, 21 nt, synthetic construct
  source 1..21: mol_type = other RNA
tttacatttggtcatcgattt

SEQ ID NO: 24334 - RNA, 21 nt, synthetic construct
  source 1..21: mol_type = other RNA
tttagaaaatcagatgggtgt

SEQ ID NO: 24335 - RNA, 21 nt, synthetic construct
  source 1..21: mol_type = other RNA
tttatgcctttctttttggtt

SEQ ID NO: 24336 - RNA, 21 nt, synthetic construct
  source 1..21: mol_type = other RNA
tttattcttcaaaatggaggt

SEQ ID NO: 24337 - RNA, 21 nt, synthetic construct
  source 1..21: mol_type = other RNA
tttattttttgggatggaatc

SEQ ID NO: 24338 - RNA, 21 nt, synthetic construct
  source 1..21: mol_type = other RNA
tttcaaagttcatttctcagt

SEQ ID NO: 24339 - RNA, 21 nt, synthetic construct
  source 1..21: mol_type = other RNA
tttcacttggggctaacttgg

SEQ ID NO: 24340 - RNA, 21 nt, synthetic construct
  source 1..21: mol_type = other RNA
tttccaccccttccatttttt

SEQ ID NO: 24341 - RNA, 21 nt, synthetic construct
  source 1..21: mol_type = other RNA
tttccactctggccaaatgag

SEQ ID NO: 24342 - RNA, 21 nt, synthetic construct
  source 1..21: mol_type = other RNA
tttccctcataattcctctat

SEQ ID NO: 24343 - RNA, 21 nt, synthetic construct
  source 1..21: mol_type = other RNA
tttctaaactgtatgaagtgt

SEQ ID NO: 24344 - RNA, 21 nt, synthetic construct
  source 1..21: mol_type = other RNA
tttctagcagatttctagcag

SEQ ID NO: 24345 - RNA, 21 nt, synthetic construct
  source 1..21: mol_type = other RNA
tttctagcagtatcttctgtc

SEQ ID NO: 24346 - RNA, 21 nt, synthetic construct
  source 1..21: mol_type = other RNA
tttctcagttcataatagccc

SEQ ID NO: 24347 - RNA, 21 nt, synthetic construct
  source 1..21: mol_type = other RNA
tttctcccaattccatttcca

SEQ ID NO: 24348 - RNA, 21 nt, synthetic construct
  source 1..21: mol_type = other RNA
tttctctggaggctctcaagg

SEQ ID NO: 24349 - RNA, 21 nt, synthetic construct
  source 1..21: mol_type = other RNA
tttcttatgtttatgcctttc

SEQ ID NO: 24350 - RNA, 21 nt, synthetic construct
  source 1..21: mol_type = other RNA
tttctttttggttcctgctcc

SEQ ID NO: 24351 - RNA, 21 nt, synthetic construct
  source 1..21: mol_type = other RNA
tttgaaaagtatcttggggcc

SEQ ID NO: 24352 - RNA, 21 nt, synthetic construct
  source 1..21: mol_type = other RNA
tttgaagaataaaccgtgact

SEQ ID NO: 24353 - RNA, 21 nt, synthetic construct
  source 1..21: mol_type = other RNA
tttgatgggggctattatgaa

SEQ ID NO: 24354 - RNA, 21 nt, synthetic construct
  source 1..21: mol_type = other RNA
tttggccagagtggaaatgga

SEQ ID NO: 24355 - RNA, 21 nt, synthetic construct
  source 1..21: mol_type = other RNA
tttggccccaagatacttttc

SEQ ID NO: 24356 - RNA, 21 nt, synthetic construct
  source 1..21: mol_type = other RNA
tttgggatggaatctcattcc

SEQ ID NO: 24357 - RNA, 21 nt, synthetic construct
  source 1..21: mol_type = other RNA
tttggtcatcgatttctccca

SEQ ID NO: 24358 - RNA, 21 nt, synthetic construct
  source 1..21: mol_type = other RNA
tttggttcctgctcctgcctt

SEQ ID NO: 24359 - RNA, 21 nt, synthetic construct
  source 1..21: mol_type = other RNA
ttttaagagcctttctctgga

SEQ ID NO: 24360 - RNA, 21 nt, synthetic construct
  source 1..21: mol_type = other RNA
ttttcaaagttcatttctcag

SEQ ID NO: 24361 - RNA, 21 nt, synthetic construct
  source 1..21: mol_type = other RNA
ttttctaaactgtatgaagtg

SEQ ID NO: 24362 - RNA, 21 nt, synthetic construct
  source 1..21: mol_type = other RNA
ttttctagcagatttctagca

SEQ ID NO: 24363 - RNA, 21 nt, synthetic construct
  source 1..21: mol_type = other RNA
ttttgaagaataaaccgtgac

SEQ ID NO: 24364 - RNA, 21 nt, synthetic construct
  source 1..21: mol_type = other RNA
ttttgggatggaatctcattc

SEQ ID NO: 24365 - RNA, 21 nt, synthetic construct
  source 1..21: mol_type = other RNA
ttttggttcctgctcctgcct

SEQ ID NO: 24366 - RNA, 21 nt, synthetic construct
  source 1..21: mol_type = other RNA
tttttaagagcctttctctgg

SEQ ID NO: 24367 - RNA, 21 nt, synthetic construct
  source 1..21: mol_type = other RNA
tttttctagcagatttctagc

SEQ ID NO: 24368 - RNA, 21 nt, synthetic construct
  source 1..21: mol_type = other RNA
tttttgggatggaatctcatt

SEQ ID NO: 24369 - RNA, 21 nt, synthetic construct
  source 1..21: mol_type = other RNA
tttttggttcctgctcctgcc

SEQ ID NO: 24370 - RNA, 21 nt, synthetic construct
  source 1..21: mol_type = other RNA
ttttttctagcagatttctag

SEQ ID NO: 24371 - RNA, 21 nt, synthetic construct
  source 1..21: mol_type = other RNA
ttttttgggatggaatctcat

SEQ ID NO: 24372 - RNA, 22 nt, synthetic construct
  source 1..22: mol_type = other RNA
aaaaaaggcatgtatagaggaa

SEQ ID NO: 24373 - RNA, 22 nt, synthetic construct
  source 1..22: mol_type = other RNA
aaaaaatggaaggggtggaaac

SEQ ID NO: 24374 - RNA, 22 nt, synthetic construct
  source 1..22: mol_type = other RNA
aaaaaggcatgtatagaggaat

SEQ ID NO: 24375 - RNA, 22 nt, synthetic construct
  source 1..22: mol_type = other RNA
aaaaataaagaacataccttgg

SEQ ID NO: 24376 - RNA, 22 nt, synthetic construct
  source 1..22: mol_type = other RNA
aaaaatgcagcgcaatctccag

SEQ ID NO: 24377 - RNA, 22 nt, synthetic construct
  source 1..22: mol_type = other RNA
aaaaatggaaggggtggaaaca

SEQ ID NO: 24378 - RNA, 22 nt, synthetic construct
  source 1..22: mol_type = other RNA
aaaacaaaaaaggcatgtatag

SEQ ID NO: 24379 - RNA, 22 nt, synthetic construct
  source 1..22: mol_type = other RNA
aaaagaaaggcataaacataag

SEQ ID NO: 24380 - RNA, 22 nt, synthetic construct
  source 1..22: mol_type = other RNA
aaaagacacattaatattgcca

SEQ ID NO: 24381 - RNA, 22 nt, synthetic construct
  source 1..22: mol_type = other RNA
aaaaggcatgtatagaggaatt

SEQ ID NO: 24382 - RNA, 22 nt, synthetic construct
  source 1..22: mol_type = other RNA
aaaagtatcttggggccaaatc

SEQ ID NO: 24383 - RNA, 22 nt, synthetic construct
  source 1..22: mol_type = other RNA
aaaataaagaacataccttggg

SEQ ID NO: 24384 - RNA, 22 nt, synthetic construct
  source 1..22: mol_type = other RNA
aaaatcagatgggtgtagatca

SEQ ID NO: 24385 - RNA, 22 nt, synthetic construct
  source 1..22: mol_type = other RNA
aaaatgcagcgcaatctccagt

SEQ ID NO: 24386 - RNA, 22 nt, synthetic construct
  source 1..22: mol_type = other RNA
aaaatggaaggggtggaaacag

SEQ ID NO: 24387 - RNA, 22 nt, synthetic construct
  source 1..22: mol_type = other RNA
aaaatggaggtggcttgttggg

SEQ ID NO: 24388 - RNA, 22 nt, synthetic construct
  source 1..22: mol_type = other RNA
aaacaaaaaaggcatgtataga

SEQ ID NO: 24389 - RNA, 22 nt, synthetic construct
  source 1..22: mol_type = other RNA
aaacacttggtgcctgatatag

SEQ ID NO: 24390 - RNA, 22 nt, synthetic construct
  source 1..22: mol_type = other RNA
aaacagagtacaataacatgag

SEQ ID NO: 24391 - RNA, 22 nt, synthetic construct
  source 1..22: mol_type = other RNA
aaaccgtgacttggtatctttc

SEQ ID NO: 24392 - RNA, 22 nt, synthetic construct
  source 1..22: mol_type = other RNA
aaactgtatgaagtgtctagta

SEQ ID NO: 24393 - RNA, 22 nt, synthetic construct
  source 1..22: mol_type = other RNA
aaagaaaggcataaacataaga

SEQ ID NO: 24394 - RNA, 22 nt, synthetic construct
  source 1..22: mol_type = other RNA
aaagaacataccttgggttgat

SEQ ID NO: 24395 - RNA, 22 nt, synthetic construct
  source 1..22: mol_type = other RNA
aaagacacattaatattgccag

SEQ ID NO: 24396 - RNA, 22 nt, synthetic construct
  source 1..22: mol_type = other RNA
aaagataccaagtcacggttta

SEQ ID NO: 24397 - RNA, 22 nt, synthetic construct
  source 1..22: mol_type = other RNA
aaaggcatgtatagaggaatta

SEQ ID NO: 24398 - RNA, 22 nt, synthetic construct
  source 1..22: mol_type = other RNA
aaaggctcttaaaaatgcagcg

SEQ ID NO: 24399 - RNA, 22 nt, synthetic construct
  source 1..22: mol_type = other RNA
aaagtatcttggggccaaatca

SEQ ID NO: 24400 - RNA, 22 nt, synthetic construct
  source 1..22: mol_type = other RNA
aaagttcatttctcagttcata

SEQ ID NO: 24401 - RNA, 22 nt, synthetic construct
  source 1..22: mol_type = other RNA
aaataaagaacataccttgggt

SEQ ID NO: 24402 - RNA, 22 nt, synthetic construct
  source 1..22: mol_type = other RNA
aaataccctggcaatattaatg

SEQ ID NO: 24403 - RNA, 22 nt, synthetic construct
  source 1..22: mol_type = other RNA
aaatcagatgggtgtagatcaa

SEQ ID NO: 24404 - RNA, 22 nt, synthetic construct
  source 1..22: mol_type = other RNA
aaatcatgtagactcttgagtg

SEQ ID NO: 24405 - RNA, 22 nt, synthetic construct
  source 1..22: mol_type = other RNA
aaatcgatgaccaaatgtaaac

SEQ ID NO: 24406 - RNA, 22 nt, synthetic construct
  source 1..22: mol_type = other RNA
aaatgagcttccaccttcccaa

SEQ ID NO: 24407 - RNA, 22 nt, synthetic construct
  source 1..22: mol_type = other RNA
aaatgcagcgcaatctccagtg

SEQ ID NO: 24408 - RNA, 22 nt, synthetic construct
  source 1..22: mol_type = other RNA
aaatggaaggggtggaaacaga

SEQ ID NO: 24409 - RNA, 22 nt, synthetic construct
  source 1..22: mol_type = other RNA
aaatggaattgggagaaatcga

SEQ ID NO: 24410 - RNA, 22 nt, synthetic construct
  source 1..22: mol_type = other RNA
aaatggaggtggcttgttggga

SEQ ID NO: 24411 - RNA, 22 nt, synthetic construct
  source 1..22: mol_type = other RNA
aaatgtaaacacttggtgcctg

SEQ ID NO: 24412 - RNA, 22 nt, synthetic construct
  source 1..22: mol_type = other RNA
aacaaaaaaggcatgtatagag

SEQ ID NO: 24413 - RNA, 22 nt, synthetic construct
  source 1..22: mol_type = other RNA
aacaagccacctccattttgaa

SEQ ID NO: 24414 - RNA, 22 nt, synthetic construct
  source 1..22: mol_type = other RNA
aacacatcactcaagagtctac

SEQ ID NO: 24415 - RNA, 22 nt, synthetic construct
  source 1..22: mol_type = other RNA
aacacttggtgcctgatatagc

SEQ ID NO: 24416 - RNA, 22 nt, synthetic construct
  source 1..22: mol_type = other RNA
aacagagtacaataacatgagt

SEQ ID NO: 24417 - RNA, 22 nt, synthetic construct
  source 1..22: mol_type = other RNA
aacataccttgggttgatccac

SEQ ID NO: 24418 - RNA, 22 nt, synthetic construct
  source 1..22: mol_type = other RNA
aacatctgccacgtatagagca

SEQ ID NO: 24419 - RNA, 22 nt, synthetic construct
  source 1..22: mol_type = other RNA
aacatgagtaatttgatggggg

SEQ ID NO: 24420 - RNA, 22 nt, synthetic construct
  source 1..22: mol_type = other RNA
aaccaaaaagaaaggcataaac

SEQ ID NO: 24421 - RNA, 22 nt, synthetic construct
  source 1..22: mol_type = other RNA
aacccaaggtatgttctttatt

SEQ ID NO: 24422 - RNA, 22 nt, synthetic construct
  source 1..22: mol_type = other RNA
aaccgtgacttggtatctttcc

SEQ ID NO: 24423 - RNA, 22 nt, synthetic construct
  source 1..22: mol_type = other RNA
aacctcagataataacatctgc

SEQ ID NO: 24424 - RNA, 22 nt, synthetic construct
  source 1..22: mol_type = other RNA
aactcccaacttcaagtgatca

SEQ ID NO: 24425 - RNA, 22 nt, synthetic construct
  source 1..22: mol_type = other RNA
aactgagaaatgaactttgaaa

SEQ ID NO: 24426 - RNA, 22 nt, synthetic construct
  source 1..22: mol_type = other RNA
aactgtatgaagtgtctagtag

SEQ ID NO: 24427 - RNA, 22 nt, synthetic construct
  source 1..22: mol_type = other RNA
aacttcaagtgatcagcctgcc

SEQ ID NO: 24428 - RNA, 22 nt, synthetic construct
  source 1..22: mol_type = other RNA
aacttggtgtcaagctatatca

SEQ ID NO: 24429 - RNA, 22 nt, synthetic construct
  source 1..22: mol_type = other RNA
aactttgaaaagtatcttgggg

SEQ ID NO: 24430 - RNA, 22 nt, synthetic construct
  source 1..22: mol_type = other RNA
aagaaaggcataaacataagaa

SEQ ID NO: 24431 - RNA, 22 nt, synthetic construct
  source 1..22: mol_type = other RNA
aagaacataccttgggttgatc

SEQ ID NO: 24432 - RNA, 22 nt, synthetic construct
  source 1..22: mol_type = other RNA
aagaataaaccgtgacttggta

SEQ ID NO: 24433 - RNA, 22 nt, synthetic construct
  source 1..22: mol_type = other RNA
aagacacattaatattgccagg

SEQ ID NO: 24434 - RNA, 22 nt, synthetic construct
  source 1..22: mol_type = other RNA
aagagcctttctctggaggctc

SEQ ID NO: 24435 - RNA, 22 nt, synthetic construct
  source 1..22: mol_type = other RNA
aagagtctacatgatttggccc

SEQ ID NO: 24436 - RNA, 22 nt, synthetic construct
  source 1..22: mol_type = other RNA
aagataccaagtcacggtttat

SEQ ID NO: 24437 - RNA, 22 nt, synthetic construct
  source 1..22: mol_type = other RNA
aagatactgctagaaatctgct

SEQ ID NO: 24438 - RNA, 22 nt, synthetic construct
  source 1..22: mol_type = other RNA
aagccacctccattttgaagaa

SEQ ID NO: 24439 - RNA, 22 nt, synthetic construct
  source 1..22: mol_type = other RNA
aagctatatcaggcaccaagtg

SEQ ID NO: 24440 - RNA, 22 nt, synthetic construct
  source 1..22: mol_type = other RNA
aagctcatttggccagagtgga

SEQ ID NO: 24441 - RNA, 22 nt, synthetic construct
  source 1..22: mol_type = other RNA
aaggaatgctatgagtgctgag

SEQ ID NO: 24442 - RNA, 22 nt, synthetic construct
  source 1..22: mol_type = other RNA
aaggacttctgatgccctctca

SEQ ID NO: 24443 - RNA, 22 nt, synthetic construct
  source 1..22: mol_type = other RNA
aaggcaggagcaggaaccaaaa

SEQ ID NO: 24444 - RNA, 22 nt, synthetic construct
  source 1..22: mol_type = other RNA
aaggcaggctgatcacttgaag

SEQ ID NO: 24445 - RNA, 22 nt, synthetic construct
  source 1..22: mol_type = other RNA
aaggcatgtatagaggaattat

SEQ ID NO: 24446 - RNA, 22 nt, synthetic construct
  source 1..22: mol_type = other RNA
aaggctcttaaaaatgcagcgc

SEQ ID NO: 24447 - RNA, 22 nt, synthetic construct
  source 1..22: mol_type = other RNA
aaggggtggaaacagagtacaa

SEQ ID NO: 24448 - RNA, 22 nt, synthetic construct
  source 1..22: mol_type = other RNA
aaggtggaagctcatttggcca

SEQ ID NO: 24449 - RNA, 22 nt, synthetic construct
  source 1..22: mol_type = other RNA
aagtatcttggggccaaatcat

SEQ ID NO: 24450 - RNA, 22 nt, synthetic construct
  source 1..22: mol_type = other RNA
aagtcacggtttattcttcaaa

SEQ ID NO: 24451 - RNA, 22 nt, synthetic construct
  source 1..22: mol_type = other RNA
aagtccttgagagcctccagag

SEQ ID NO: 24452 - RNA, 22 nt, synthetic construct
  source 1..22: mol_type = other RNA
aagtgaaataccctggcaatat

SEQ ID NO: 24453 - RNA, 22 nt, synthetic construct
  source 1..22: mol_type = other RNA
aagtgattcctgggactacagg

SEQ ID NO: 24454 - RNA, 22 nt, synthetic construct
  source 1..22: mol_type = other RNA
aagtggatcaacccaaggtatg

SEQ ID NO: 24455 - RNA, 22 nt, synthetic construct
  source 1..22: mol_type = other RNA
aagtgtctagtagagtgcctgg

SEQ ID NO: 24456 - RNA, 22 nt, synthetic construct
  source 1..22: mol_type = other RNA
aagtgtttacatttggtcatcg

SEQ ID NO: 24457 - RNA, 22 nt, synthetic construct
  source 1..22: mol_type = other RNA
aagttagccccaagtgaaatac

SEQ ID NO: 24458 - RNA, 22 nt, synthetic construct
  source 1..22: mol_type = other RNA
aagttcatttctcagttcataa

SEQ ID NO: 24459 - RNA, 22 nt, synthetic construct
  source 1..22: mol_type = other RNA
aataaaccgtgacttggtatct

SEQ ID NO: 24460 - RNA, 22 nt, synthetic construct
  source 1..22: mol_type = other RNA
aataaagaacataccttgggtt

SEQ ID NO: 24461 - RNA, 22 nt, synthetic construct
  source 1..22: mol_type = other RNA
aataacatctgccacgtataga

SEQ ID NO: 24462 - RNA, 22 nt, synthetic construct
  source 1..22: mol_type = other RNA
aataacatgagtaatttgatgg

SEQ ID NO: 24463 - RNA, 22 nt, synthetic construct
  source 1..22: mol_type = other RNA
aataccctggcaatattaatgt

SEQ ID NO: 24464 - RNA, 22 nt, synthetic construct
  source 1..22: mol_type = other RNA
aatagcccccatcaaattactc

SEQ ID NO: 24465 - RNA, 22 nt, synthetic construct
  source 1..22: mol_type = other RNA
aatatcgggaaaagacacatta

SEQ ID NO: 24466 - RNA, 22 nt, synthetic construct
  source 1..22: mol_type = other RNA
aatattaatgtgtcttttcccg

SEQ ID NO: 24467 - RNA, 22 nt, synthetic construct
  source 1..22: mol_type = other RNA
aatattgccagggtatttcact

SEQ ID NO: 24468 - RNA, 22 nt, synthetic construct
  source 1..22: mol_type = other RNA
aatcagatgggtgtagatcaag

SEQ ID NO: 24469 - RNA, 22 nt, synthetic construct
  source 1..22: mol_type = other RNA
aatcatgtagactcttgagtga

SEQ ID NO: 24470 - RNA, 22 nt, synthetic construct
  source 1..22: mol_type = other RNA
aatcgatgaccaaatgtaaaca

SEQ ID NO: 24471 - RNA, 22 nt, synthetic construct
  source 1..22: mol_type = other RNA
aatctcattccattgcccaggc

SEQ ID NO: 24472 - RNA, 22 nt, synthetic construct
  source 1..22: mol_type = other RNA
aatctccagtgacagaagatac

SEQ ID NO: 24473 - RNA, 22 nt, synthetic construct
  source 1..22: mol_type = other RNA
aatgagattccatcccaaaaaa

SEQ ID NO: 24474 - RNA, 22 nt, synthetic construct
  source 1..22: mol_type = other RNA
aatgagcttccaccttcccaac

SEQ ID NO: 24475 - RNA, 22 nt, synthetic construct
  source 1..22: mol_type = other RNA
aatgcagcgcaatctccagtga

SEQ ID NO: 24476 - RNA, 22 nt, synthetic construct
  source 1..22: mol_type = other RNA
aatgctatgagtgctgagaggg

SEQ ID NO: 24477 - RNA, 22 nt, synthetic construct
  source 1..22: mol_type = other RNA
aatggaaggggtggaaacagag

SEQ ID NO: 24478 - RNA, 22 nt, synthetic construct
  source 1..22: mol_type = other RNA
aatggaatgagattccatccca

SEQ ID NO: 24479 - RNA, 22 nt, synthetic construct
  source 1..22: mol_type = other RNA
aatggaattgggagaaatcgat

SEQ ID NO: 24480 - RNA, 22 nt, synthetic construct
  source 1..22: mol_type = other RNA
aatggaggtggcttgttgggaa

SEQ ID NO: 24481 - RNA, 22 nt, synthetic construct
  source 1..22: mol_type = other RNA
aatgtaaacacttggtgcctga

SEQ ID NO: 24482 - RNA, 22 nt, synthetic construct
  source 1..22: mol_type = other RNA
aattactcatgttattgtactc

SEQ ID NO: 24483 - RNA, 22 nt, synthetic construct
  source 1..22: mol_type = other RNA
aattatgagggaaagataccaa

SEQ ID NO: 24484 - RNA, 22 nt, synthetic construct
  source 1..22: mol_type = other RNA
aattccatttccactctggcca

SEQ ID NO: 24485 - RNA, 22 nt, synthetic construct
  source 1..22: mol_type = other RNA
aattcctctatacatgcctttt

SEQ ID NO: 24486 - RNA, 22 nt, synthetic construct
  source 1..22: mol_type = other RNA
aattgctatgtcccaggcactc

SEQ ID NO: 24487 - RNA, 22 nt, synthetic construct
  source 1..22: mol_type = other RNA
aattgctctatacgtggcagat

SEQ ID NO: 24488 - RNA, 22 nt, synthetic construct
  source 1..22: mol_type = other RNA
aattgggagaaatcgatgacca

SEQ ID NO: 24489 - RNA, 22 nt, synthetic construct
  source 1..22: mol_type = other RNA
aatttgatgggggctattatga

SEQ ID NO: 24490 - RNA, 22 nt, synthetic construct
  source 1..22: mol_type = other RNA
acaaaaaaggcatgtatagagg

SEQ ID NO: 24491 - RNA, 22 nt, synthetic construct
  source 1..22: mol_type = other RNA
acaagccacctccattttgaag

SEQ ID NO: 24492 - RNA, 22 nt, synthetic construct
  source 1..22: mol_type = other RNA
acacatcactcaagagtctaca

SEQ ID NO: 24493 - RNA, 22 nt, synthetic construct
  source 1..22: mol_type = other RNA
acacattaatattgccagggta

SEQ ID NO: 24494 - RNA, 22 nt, synthetic construct
  source 1..22: mol_type = other RNA
acaccaagttagccccaagtga

SEQ ID NO: 24495 - RNA, 22 nt, synthetic construct
  source 1..22: mol_type = other RNA
acacccatctgattttctaaac

SEQ ID NO: 24496 - RNA, 22 nt, synthetic construct
  source 1..22: mol_type = other RNA
acactgcactccagcctgggca

SEQ ID NO: 24497 - RNA, 22 nt, synthetic construct
  source 1..22: mol_type = other RNA
acacttcatacagtttagaaaa

SEQ ID NO: 24498 - RNA, 22 nt, synthetic construct
  source 1..22: mol_type = other RNA
acacttggtgcctgatatagct

SEQ ID NO: 24499 - RNA, 22 nt, synthetic construct
  source 1..22: mol_type = other RNA
acagaagatactgctagaaatc

SEQ ID NO: 24500 - RNA, 22 nt, synthetic construct
  source 1..22: mol_type = other RNA
acagagtacaataacatgagta

SEQ ID NO: 24501 - RNA, 22 nt, synthetic construct
  source 1..22: mol_type = other RNA
acagtttagaaaatcagatggg

SEQ ID NO: 24502 - RNA, 22 nt, synthetic construct
  source 1..22: mol_type = other RNA
acataccttgggttgatccact

SEQ ID NO: 24503 - RNA, 22 nt, synthetic construct
  source 1..22: mol_type = other RNA
acatagcaattgctctatacgt

SEQ ID NO: 24504 - RNA, 22 nt, synthetic construct
  source 1..22: mol_type = other RNA
acatcactcaagagtctacatg

SEQ ID NO: 24505 - RNA, 22 nt, synthetic construct
  source 1..22: mol_type = other RNA
acatctgccacgtatagagcaa

SEQ ID NO: 24506 - RNA, 22 nt, synthetic construct
  source 1..22: mol_type = other RNA
acatgagtaatttgatgggggc

SEQ ID NO: 24507 - RNA, 22 nt, synthetic construct
  source 1..22: mol_type = other RNA
acatgatttggccccaagatac

SEQ ID NO: 24508 - RNA, 22 nt, synthetic construct
  source 1..22: mol_type = other RNA
acattaatattgccagggtatt

SEQ ID NO: 24509 - RNA, 22 nt, synthetic construct
  source 1..22: mol_type = other RNA
acatttggtcatcgatttctcc

SEQ ID NO: 24510 - RNA, 22 nt, synthetic construct
  source 1..22: mol_type = other RNA
accaaaaagaaaggcataaaca

SEQ ID NO: 24511 - RNA, 22 nt, synthetic construct
  source 1..22: mol_type = other RNA
accaaatgtaaacacttggtgc

SEQ ID NO: 24512 - RNA, 22 nt, synthetic construct
  source 1..22: mol_type = other RNA
accaagtcacggtttattcttc

SEQ ID NO: 24513 - RNA, 22 nt, synthetic construct
  source 1..22: mol_type = other RNA
accaagtgtttacatttggtca

SEQ ID NO: 24514 - RNA, 22 nt, synthetic construct
  source 1..22: mol_type = other RNA
accaagttagccccaagtgaaa

SEQ ID NO: 24515 - RNA, 22 nt, synthetic construct
  source 1..22: mol_type = other RNA
acccaaggtatgttctttattt

SEQ ID NO: 24516 - RNA, 22 nt, synthetic construct
  source 1..22: mol_type = other RNA
acccatctgattttctaaactg

SEQ ID NO: 24517 - RNA, 22 nt, synthetic construct
  source 1..22: mol_type = other RNA
accctggcaatattaatgtgtc

SEQ ID NO: 24518 - RNA, 22 nt, synthetic construct
  source 1..22: mol_type = other RNA
accgtgacttggtatctttccc

SEQ ID NO: 24519 - RNA, 22 nt, synthetic construct
  source 1..22: mol_type = other RNA
acctcagataataacatctgcc

SEQ ID NO: 24520 - RNA, 22 nt, synthetic construct
  source 1..22: mol_type = other RNA
acctccattttgaagaataaac

SEQ ID NO: 24521 - RNA, 22 nt, synthetic construct
  source 1..22: mol_type = other RNA
accttcccaacaagccacctcc

SEQ ID NO: 24522 - RNA, 22 nt, synthetic construct
  source 1..22: mol_type = other RNA
accttgggttgatccacttagg

SEQ ID NO: 24523 - RNA, 22 nt, synthetic construct
  source 1..22: mol_type = other RNA
acggtttattcttcaaaatgga

SEQ ID NO: 24524 - RNA, 22 nt, synthetic construct
  source 1..22: mol_type = other RNA
acgtatagagcaattgctatgt

SEQ ID NO: 24525 - RNA, 22 nt, synthetic construct
  source 1..22: mol_type = other RNA
acgtggcagatgttattatctg

SEQ ID NO: 24526 - RNA, 22 nt, synthetic construct
  source 1..22: mol_type = other RNA
actagacacttcatacagttta

SEQ ID NO: 24527 - RNA, 22 nt, synthetic construct
  source 1..22: mol_type = other RNA
actcaagagtctacatgatttg

SEQ ID NO: 24528 - RNA, 22 nt, synthetic construct
  source 1..22: mol_type = other RNA
actcatagcattccttaacaca

SEQ ID NO: 24529 - RNA, 22 nt, synthetic construct
  source 1..22: mol_type = other RNA
actcatgttattgtactctgtt

SEQ ID NO: 24530 - RNA, 22 nt, synthetic construct
  source 1..22: mol_type = other RNA
actccagcctgggcaatggaat

SEQ ID NO: 24531 - RNA, 22 nt, synthetic construct
  source 1..22: mol_type = other RNA
actcccaacttcaagtgatcag

SEQ ID NO: 24532 - RNA, 22 nt, synthetic construct
  source 1..22: mol_type = other RNA
actctactagacacttcataca

SEQ ID NO: 24533 - RNA, 22 nt, synthetic construct
  source 1..22: mol_type = other RNA
actctggccaaatgagcttcca

SEQ ID NO: 24534 - RNA, 22 nt, synthetic construct
  source 1..22: mol_type = other RNA
actctgtttccaccccttccat

SEQ ID NO: 24535 - RNA, 22 nt, synthetic construct
  source 1..22: mol_type = other RNA
actcttgagtgatgtgttaagg

SEQ ID NO: 24536 - RNA, 22 nt, synthetic construct
  source 1..22: mol_type = other RNA
actgagaaatgaactttgaaaa

SEQ ID NO: 24537 - RNA, 22 nt, synthetic construct
  source 1..22: mol_type = other RNA
actgcacactgcactccagcct

SEQ ID NO: 24538 - RNA, 22 nt, synthetic construct
  source 1..22: mol_type = other RNA
actgctagaaatctgctagaaa

SEQ ID NO: 24539 - RNA, 22 nt, synthetic construct
  source 1..22: mol_type = other RNA
actggagattgcgctgcatttt

SEQ ID NO: 24540 - RNA, 22 nt, synthetic construct
  source 1..22: mol_type = other RNA
actgtatgaagtgtctagtaga

SEQ ID NO: 24541 - RNA, 22 nt, synthetic construct
  source 1..22: mol_type = other RNA
acttaggaacctcagataataa

SEQ ID NO: 24542 - RNA, 22 nt, synthetic construct
  source 1..22: mol_type = other RNA
acttcaagtgatcagcctgcct

SEQ ID NO: 24543 - RNA, 22 nt, synthetic construct
  source 1..22: mol_type = other RNA
acttcatacagtttagaaaatc

SEQ ID NO: 24544 - RNA, 22 nt, synthetic construct
  source 1..22: mol_type = other RNA
acttctgatgccctctcagcac

SEQ ID NO: 24545 - RNA, 22 nt, synthetic construct
  source 1..22: mol_type = other RNA
acttggggctaacttggtgtca

SEQ ID NO: 24546 - RNA, 22 nt, synthetic construct
  source 1..22: mol_type = other RNA
acttggtatctttccctcataa

SEQ ID NO: 24547 - RNA, 22 nt, synthetic construct
  source 1..22: mol_type = other RNA
acttggtgcctgatatagcttg

SEQ ID NO: 24548 - RNA, 22 nt, synthetic construct
  source 1..22: mol_type = other RNA
acttggtgtcaagctatatcag

SEQ ID NO: 24549 - RNA, 22 nt, synthetic construct
  source 1..22: mol_type = other RNA
actttgaaaagtatcttggggc

SEQ ID NO: 24550 - RNA, 22 nt, synthetic construct
  source 1..22: mol_type = other RNA
acttttcaaagttcatttctca

SEQ ID NO: 24551 - RNA, 22 nt, synthetic construct
  source 1..22: mol_type = other RNA
agaaaatcagatgggtgtagat

SEQ ID NO: 24552 - RNA, 22 nt, synthetic construct
  source 1..22: mol_type = other RNA
agaaaggcataaacataagaaa

SEQ ID NO: 24553 - RNA, 22 nt, synthetic construct
  source 1..22: mol_type = other RNA
agaaaggctcttaaaaatgcag

SEQ ID NO: 24554 - RNA, 22 nt, synthetic construct
  source 1..22: mol_type = other RNA
agaaatcgatgaccaaatgtaa

SEQ ID NO: 24555 - RNA, 22 nt, synthetic construct
  source 1..22: mol_type = other RNA
agaacataccttgggttgatcc

SEQ ID NO: 24556 - RNA, 22 nt, synthetic construct
  source 1..22: mol_type = other RNA
agaagatactgctagaaatctg

SEQ ID NO: 24557 - RNA, 22 nt, synthetic construct
  source 1..22: mol_type = other RNA
agaagtccttgagagcctccag

SEQ ID NO: 24558 - RNA, 22 nt, synthetic construct
  source 1..22: mol_type = other RNA
agaataaaccgtgacttggtat

SEQ ID NO: 24559 - RNA, 22 nt, synthetic construct
  source 1..22: mol_type = other RNA
agacacattaatattgccaggg

SEQ ID NO: 24560 - RNA, 22 nt, synthetic construct
  source 1..22: mol_type = other RNA
agacacttcatacagtttagaa

SEQ ID NO: 24561 - RNA, 22 nt, synthetic construct
  source 1..22: mol_type = other RNA
agactcttgagtgatgtgttaa

SEQ ID NO: 24562 - RNA, 22 nt, synthetic construct
  source 1..22: mol_type = other RNA
agagaaaggctcttaaaaatgc

SEQ ID NO: 24563 - RNA, 22 nt, synthetic construct
  source 1..22: mol_type = other RNA
agagcaattgctatgtcccagg

SEQ ID NO: 24564 - RNA, 22 nt, synthetic construct
  source 1..22: mol_type = other RNA
agagcctccagagaaaggctct

SEQ ID NO: 24565 - RNA, 22 nt, synthetic construct
  source 1..22: mol_type = other RNA
agagcctttctctggaggctct

SEQ ID NO: 24566 - RNA, 22 nt, synthetic construct
  source 1..22: mol_type = other RNA
agaggaattatgagggaaagat

SEQ ID NO: 24567 - RNA, 22 nt, synthetic construct
  source 1..22: mol_type = other RNA
agagggcatcagaagtccttga

SEQ ID NO: 24568 - RNA, 22 nt, synthetic construct
  source 1..22: mol_type = other RNA
agagtacaataacatgagtaat

SEQ ID NO: 24569 - RNA, 22 nt, synthetic construct
  source 1..22: mol_type = other RNA
agagtctacatgatttggcccc

SEQ ID NO: 24570 - RNA, 22 nt, synthetic construct
  source 1..22: mol_type = other RNA
agagtgcctgggacatagcaat

SEQ ID NO: 24571 - RNA, 22 nt, synthetic construct
  source 1..22: mol_type = other RNA
agagtggaaatggaattgggag

SEQ ID NO: 24572 - RNA, 22 nt, synthetic construct
  source 1..22: mol_type = other RNA
agataataacatctgccacgta

SEQ ID NO: 24573 - RNA, 22 nt, synthetic construct
  source 1..22: mol_type = other RNA
agataccaagtcacggtttatt

SEQ ID NO: 24574 - RNA, 22 nt, synthetic construct
  source 1..22: mol_type = other RNA
agatactgctagaaatctgcta

SEQ ID NO: 24575 - RNA, 22 nt, synthetic construct
  source 1..22: mol_type = other RNA
agatcaaggcaggagcaggaac

SEQ ID NO: 24576 - RNA, 22 nt, synthetic construct
  source 1..22: mol_type = other RNA
agatctcaccactgcacactgc

SEQ ID NO: 24577 - RNA, 22 nt, synthetic construct
  source 1..22: mol_type = other RNA
agatgggtgtagatcaaggcag

SEQ ID NO: 24578 - RNA, 22 nt, synthetic construct
  source 1..22: mol_type = other RNA
agatgttattatctgaggttcc

SEQ ID NO: 24579 - RNA, 22 nt, synthetic construct
  source 1..22: mol_type = other RNA
agattccatcccaaaaaataaa

SEQ ID NO: 24580 - RNA, 22 nt, synthetic construct
  source 1..22: mol_type = other RNA
agattgcgctgcatttttaaga

SEQ ID NO: 24581 - RNA, 22 nt, synthetic construct
  source 1..22: mol_type = other RNA
agatttctagcagtatcttctg

SEQ ID NO: 24582 - RNA, 22 nt, synthetic construct
  source 1..22: mol_type = other RNA
agcaattgctatgtcccaggca

SEQ ID NO: 24583 - RNA, 22 nt, synthetic construct
  source 1..22: mol_type = other RNA
agcaattgctctatacgtggca

SEQ ID NO: 24584 - RNA, 22 nt, synthetic construct
  source 1..22: mol_type = other RNA
agcactcatagcattccttaac

SEQ ID NO: 24585 - RNA, 22 nt, synthetic construct
  source 1..22: mol_type = other RNA
agcagatttctagcagtatctt

SEQ ID NO: 24586 - RNA, 22 nt, synthetic construct
  source 1..22: mol_type = other RNA
agcaggaaccaaaaagaaaggc

SEQ ID NO: 24587 - RNA, 22 nt, synthetic construct
  source 1..22: mol_type = other RNA
agcagtatcttctgtcactgga

SEQ ID NO: 24588 - RNA, 22 nt, synthetic construct
  source 1..22: mol_type = other RNA
agcattccttaacacatcactc

SEQ ID NO: 24589 - RNA, 22 nt, synthetic construct
  source 1..22: mol_type = other RNA
agccacctccattttgaagaat

SEQ ID NO: 24590 - RNA, 22 nt, synthetic construct
  source 1..22: mol_type = other RNA
agccccaagtgaaataccctgg

SEQ ID NO: 24591 - RNA, 22 nt, synthetic construct
  source 1..22: mol_type = other RNA
agcccccatcaaattactcatg

SEQ ID NO: 24592 - RNA, 22 nt, synthetic construct
  source 1..22: mol_type = other RNA
agcctccagagaaaggctctta

SEQ ID NO: 24593 - RNA, 22 nt, synthetic construct
  source 1..22: mol_type = other RNA
agcctgggcaatggaatgagat

SEQ ID NO: 24594 - RNA, 22 nt, synthetic construct
  source 1..22: mol_type = other RNA
agcctttctctggaggctctca

SEQ ID NO: 24595 - RNA, 22 nt, synthetic construct
  source 1..22: mol_type = other RNA
agcgcaatctccagtgacagaa

SEQ ID NO: 24596 - RNA, 22 nt, synthetic construct
  source 1..22: mol_type = other RNA
agctatatcaggcaccaagtgt

SEQ ID NO: 24597 - RNA, 22 nt, synthetic construct
  source 1..22: mol_type = other RNA
agctcatttggccagagtggaa

SEQ ID NO: 24598 - RNA, 22 nt, synthetic construct
  source 1..22: mol_type = other RNA
agctgagatctcaccactgcac

SEQ ID NO: 24599 - RNA, 22 nt, synthetic construct
  source 1..22: mol_type = other RNA
agcttccaccttcccaacaagc

SEQ ID NO: 24600 - RNA, 22 nt, synthetic construct
  source 1..22: mol_type = other RNA
agcttgacaccaagttagcccc

SEQ ID NO: 24601 - RNA, 22 nt, synthetic construct
  source 1..22: mol_type = other RNA
aggaaccaaaaagaaaggcata

SEQ ID NO: 24602 - RNA, 22 nt, synthetic construct
  source 1..22: mol_type = other RNA
aggaacctcagataataacatc

SEQ ID NO: 24603 - RNA, 22 nt, synthetic construct
  source 1..22: mol_type = other RNA
aggaatatcgggaaaagacaca

SEQ ID NO: 24604 - RNA, 22 nt, synthetic construct
  source 1..22: mol_type = other RNA
aggaatgctatgagtgctgaga

SEQ ID NO: 24605 - RNA, 22 nt, synthetic construct
  source 1..22: mol_type = other RNA
aggaattatgagggaaagatac

SEQ ID NO: 24606 - RNA, 22 nt, synthetic construct
  source 1..22: mol_type = other RNA
aggacttctgatgccctctcag

SEQ ID NO: 24607 - RNA, 22 nt, synthetic construct
  source 1..22: mol_type = other RNA
aggagcaggaaccaaaaagaaa

SEQ ID NO: 24608 - RNA, 22 nt, synthetic construct
  source 1..22: mol_type = other RNA
aggcaccaagtgtttacatttg

SEQ ID NO: 24609 - RNA, 22 nt, synthetic construct
  source 1..22: mol_type = other RNA
aggcactctactagacacttca

SEQ ID NO: 24610 - RNA, 22 nt, synthetic construct
  source 1..22: mol_type = other RNA
aggcaggagcaggaaccaaaaa

SEQ ID NO: 24611 - RNA, 22 nt, synthetic construct
  source 1..22: mol_type = other RNA
aggcaggctgatcacttgaagt

SEQ ID NO: 24612 - RNA, 22 nt, synthetic construct
  source 1..22: mol_type = other RNA
aggcatgtatagaggaattatg

SEQ ID NO: 24613 - RNA, 22 nt, synthetic construct
  source 1..22: mol_type = other RNA
aggccaaggcaggctgatcact

SEQ ID NO: 24614 - RNA, 22 nt, synthetic construct
  source 1..22: mol_type = other RNA
aggctctcaaggacttctgatg

SEQ ID NO: 24615 - RNA, 22 nt, synthetic construct
  source 1..22: mol_type = other RNA
aggctcttaaaaatgcagcgca

SEQ ID NO: 24616 - RNA, 22 nt, synthetic construct
  source 1..22: mol_type = other RNA
aggctgatcacttgaagttggg

SEQ ID NO: 24617 - RNA, 22 nt, synthetic construct
  source 1..22: mol_type = other RNA
aggctggagtgcagtgtgcagt

SEQ ID NO: 24618 - RNA, 22 nt, synthetic construct
  source 1..22: mol_type = other RNA
agggaaagataccaagtcacgg

SEQ ID NO: 24619 - RNA, 22 nt, synthetic construct
  source 1..22: mol_type = other RNA
agggcatcagaagtccttgaga

SEQ ID NO: 24620 - RNA, 22 nt, synthetic construct
  source 1..22: mol_type = other RNA
aggggtggaaacagagtacaat

SEQ ID NO: 24621 - RNA, 22 nt, synthetic construct
  source 1..22: mol_type = other RNA
agggtatttcacttggggctaa

SEQ ID NO: 24622 - RNA, 22 nt, synthetic construct
  source 1..22: mol_type = other RNA
aggtggaagctcatttggccag

SEQ ID NO: 24623 - RNA, 22 nt, synthetic construct
  source 1..22: mol_type = other RNA
aggtggcttgttgggaaggtgg

SEQ ID NO: 24624 - RNA, 22 nt, synthetic construct
  source 1..22: mol_type = other RNA
aggttcctaagtggatcaaccc

SEQ ID NO: 24625 - RNA, 22 nt, synthetic construct
  source 1..22: mol_type = other RNA
agtaatttgatgggggctatta

SEQ ID NO: 24626 - RNA, 22 nt, synthetic construct
  source 1..22: mol_type = other RNA
agtagagtgcctgggacatagc

SEQ ID NO: 24627 - RNA, 22 nt, synthetic construct
  source 1..22: mol_type = other RNA
agtatcttctgtcactggagat

SEQ ID NO: 24628 - RNA, 22 nt, synthetic construct
  source 1..22: mol_type = other RNA
agtatcttggggccaaatcatg

SEQ ID NO: 24629 - RNA, 22 nt, synthetic construct
  source 1..22: mol_type = other RNA
agtcacggtttattcttcaaaa

SEQ ID NO: 24630 - RNA, 22 nt, synthetic construct
  source 1..22: mol_type = other RNA
agtcccaggaatcacttgaacc

SEQ ID NO: 24631 - RNA, 22 nt, synthetic construct
  source 1..22: mol_type = other RNA
agtccttgagagcctccagaga

SEQ ID NO: 24632 - RNA, 22 nt, synthetic construct
  source 1..22: mol_type = other RNA
agtctacatgatttggccccaa

SEQ ID NO: 24633 - RNA, 22 nt, synthetic construct
  source 1..22: mol_type = other RNA
agtgaaataccctggcaatatt

SEQ ID NO: 24634 - RNA, 22 nt, synthetic construct
  source 1..22: mol_type = other RNA
agtgacagaagatactgctaga

SEQ ID NO: 24635 - RNA, 22 nt, synthetic construct
  source 1..22: mol_type = other RNA
agtgagctgagatctcaccact

SEQ ID NO: 24636 - RNA, 22 nt, synthetic construct
  source 1..22: mol_type = other RNA
agtgatgtgttaaggaatgcta

SEQ ID NO: 24637 - RNA, 22 nt, synthetic construct
  source 1..22: mol_type = other RNA
agtgattcctgggactacaggc

SEQ ID NO: 24638 - RNA, 22 nt, synthetic construct
  source 1..22: mol_type = other RNA
agtgcagtgtgcagtggtgaga

SEQ ID NO: 24639 - RNA, 22 nt, synthetic construct
  source 1..22: mol_type = other RNA
agtgcctgggacatagcaattg

SEQ ID NO: 24640 - RNA, 22 nt, synthetic construct
  source 1..22: mol_type = other RNA
agtgctgagagggcatcagaag

SEQ ID NO: 24641 - RNA, 22 nt, synthetic construct
  source 1..22: mol_type = other RNA
agtggaaatggaattgggagaa

SEQ ID NO: 24642 - RNA, 22 nt, synthetic construct
  source 1..22: mol_type = other RNA
agtggatcaacccaaggtatgt

SEQ ID NO: 24643 - RNA, 22 nt, synthetic construct
  source 1..22: mol_type = other RNA
agtgtctagtagagtgcctggg

SEQ ID NO: 24644 - RNA, 22 nt, synthetic construct
  source 1..22: mol_type = other RNA
agtgtgcagtggtgagatctca

SEQ ID NO: 24645 - RNA, 22 nt, synthetic construct
  source 1..22: mol_type = other RNA
agtgtttacatttggtcatcga

SEQ ID NO: 24646 - RNA, 22 nt, synthetic construct
  source 1..22: mol_type = other RNA
agttagccccaagtgaaatacc

SEQ ID NO: 24647 - RNA, 22 nt, synthetic construct
  source 1..22: mol_type = other RNA
agttcataatagcccccatcaa

SEQ ID NO: 24648 - RNA, 22 nt, synthetic construct
  source 1..22: mol_type = other RNA
agttcatttctcagttcataat

SEQ ID NO: 24649 - RNA, 22 nt, synthetic construct
  source 1..22: mol_type = other RNA
agtttagaaaatcagatgggtg

SEQ ID NO: 24650 - RNA, 22 nt, synthetic construct
  source 1..22: mol_type = other RNA
ataaaccgtgacttggtatctt

SEQ ID NO: 24651 - RNA, 22 nt, synthetic construct
  source 1..22: mol_type = other RNA
ataaagaacataccttgggttg

SEQ ID NO: 24652 - RNA, 22 nt, synthetic construct
  source 1..22: mol_type = other RNA
ataacatctgccacgtatagag

SEQ ID NO: 24653 - RNA, 22 nt, synthetic construct
  source 1..22: mol_type = other RNA
ataacatgagtaatttgatggg

SEQ ID NO: 24654 - RNA, 22 nt, synthetic construct
  source 1..22: mol_type = other RNA
ataataacatctgccacgtata

SEQ ID NO: 24655 - RNA, 22 nt, synthetic construct
  source 1..22: mol_type = other RNA
ataatagcccccatcaaattac

SEQ ID NO: 24656 - RNA, 22 nt, synthetic construct
  source 1..22: mol_type = other RNA
ataattcctctatacatgcctt

SEQ ID NO: 24657 - RNA, 22 nt, synthetic construct
  source 1..22: mol_type = other RNA
atacagtttagaaaatcagatg

SEQ ID NO: 24658 - RNA, 22 nt, synthetic construct
  source 1..22: mol_type = other RNA
ataccaagtcacggtttattct

SEQ ID NO: 24659 - RNA, 22 nt, synthetic construct
  source 1..22: mol_type = other RNA
ataccctggcaatattaatgtg

SEQ ID NO: 24660 - RNA, 22 nt, synthetic construct
  source 1..22: mol_type = other RNA
ataccttgggttgatccactta

SEQ ID NO: 24661 - RNA, 22 nt, synthetic construct
  source 1..22: mol_type = other RNA
atacgtggcagatgttattatc

SEQ ID NO: 24662 - RNA, 22 nt, synthetic construct
  source 1..22: mol_type = other RNA
atactgctagaaatctgctaga

SEQ ID NO: 24663 - RNA, 22 nt, synthetic construct
  source 1..22: mol_type = other RNA
atagagcaattgctatgtccca

SEQ ID NO: 24664 - RNA, 22 nt, synthetic construct
  source 1..22: mol_type = other RNA
atagaggaattatgagggaaag

SEQ ID NO: 24665 - RNA, 22 nt, synthetic construct
  source 1..22: mol_type = other RNA
atagcaattgctctatacgtgg

SEQ ID NO: 24666 - RNA, 22 nt, synthetic construct
  source 1..22: mol_type = other RNA
atagcattccttaacacatcac

SEQ ID NO: 24667 - RNA, 22 nt, synthetic construct
  source 1..22: mol_type = other RNA
atagcccccatcaaattactca

SEQ ID NO: 24668 - RNA, 22 nt, synthetic construct
  source 1..22: mol_type = other RNA
atagcttgacaccaagttagcc

SEQ ID NO: 24669 - RNA, 22 nt, synthetic construct
  source 1..22: mol_type = other RNA
atatagcttgacaccaagttag

SEQ ID NO: 24670 - RNA, 22 nt, synthetic construct
  source 1..22: mol_type = other RNA
atatcaggcaccaagtgtttac

SEQ ID NO: 24671 - RNA, 22 nt, synthetic construct
  source 1..22: mol_type = other RNA
atatcgggaaaagacacattaa

SEQ ID NO: 24672 - RNA, 22 nt, synthetic construct
  source 1..22: mol_type = other RNA
atattaatgtgtcttttcccga

SEQ ID NO: 24673 - RNA, 22 nt, synthetic construct
  source 1..22: mol_type = other RNA
atattgccagggtatttcactt

SEQ ID NO: 24674 - RNA, 22 nt, synthetic construct
  source 1..22: mol_type = other RNA
atcaacccaaggtatgttcttt

SEQ ID NO: 24675 - RNA, 22 nt, synthetic construct
  source 1..22: mol_type = other RNA
atcaaggcaggagcaggaacca

SEQ ID NO: 24676 - RNA, 22 nt, synthetic construct
  source 1..22: mol_type = other RNA
atcactcaagagtctacatgat

SEQ ID NO: 24677 - RNA, 22 nt, synthetic construct
  source 1..22: mol_type = other RNA
atcagaagtccttgagagcctc

SEQ ID NO: 24678 - RNA, 22 nt, synthetic construct
  source 1..22: mol_type = other RNA
atcagatgggtgtagatcaagg

SEQ ID NO: 24679 - RNA, 22 nt, synthetic construct
  source 1..22: mol_type = other RNA
atcaggcaccaagtgtttacat

SEQ ID NO: 24680 - RNA, 22 nt, synthetic construct
  source 1..22: mol_type = other RNA
atcatgtagactcttgagtgat

SEQ ID NO: 24681 - RNA, 22 nt, synthetic construct
  source 1..22: mol_type = other RNA
atccacttaggaacctcagata

SEQ ID NO: 24682 - RNA, 22 nt, synthetic construct
  source 1..22: mol_type = other RNA
atcgatgaccaaatgtaaacac

SEQ ID NO: 24683 - RNA, 22 nt, synthetic construct
  source 1..22: mol_type = other RNA
atcgatttctcccaattccatt

SEQ ID NO: 24684 - RNA, 22 nt, synthetic construct
  source 1..22: mol_type = other RNA
atcgggaaaagacacattaata

SEQ ID NO: 24685 - RNA, 22 nt, synthetic construct
  source 1..22: mol_type = other RNA
atctacacccatctgattttct

SEQ ID NO: 24686 - RNA, 22 nt, synthetic construct
  source 1..22: mol_type = other RNA
atctcaccactgcacactgcac

SEQ ID NO: 24687 - RNA, 22 nt, synthetic construct
  source 1..22: mol_type = other RNA
atctccagtgacagaagatact

SEQ ID NO: 24688 - RNA, 22 nt, synthetic construct
  source 1..22: mol_type = other RNA
atctgaggttcctaagtggatc

SEQ ID NO: 24689 - RNA, 22 nt, synthetic construct
  source 1..22: mol_type = other RNA
atctgattttctaaactgtatg

SEQ ID NO: 24690 - RNA, 22 nt, synthetic construct
  source 1..22: mol_type = other RNA
atctgccacgtatagagcaatt

SEQ ID NO: 24691 - RNA, 22 nt, synthetic construct
  source 1..22: mol_type = other RNA
atcttctgtcactggagattgc

SEQ ID NO: 24692 - RNA, 22 nt, synthetic construct
  source 1..22: mol_type = other RNA
atcttggggccaaatcatgtag

SEQ ID NO: 24693 - RNA, 22 nt, synthetic construct
  source 1..22: mol_type = other RNA
atctttccctcataattcctct

SEQ ID NO: 24694 - RNA, 22 nt, synthetic construct
  source 1..22: mol_type = other RNA
atgaactgagaaatgaactttg

SEQ ID NO: 24695 - RNA, 22 nt, synthetic construct
  source 1..22: mol_type = other RNA
atgaactttgaaaagtatcttg

SEQ ID NO: 24696 - RNA, 22 nt, synthetic construct
  source 1..22: mol_type = other RNA
atgaagtgtctagtagagtgcc

SEQ ID NO: 24697 - RNA, 22 nt, synthetic construct
  source 1..22: mol_type = other RNA
atgaccaaatgtaaacacttgg

SEQ ID NO: 24698 - RNA, 22 nt, synthetic construct
  source 1..22: mol_type = other RNA
atgagattccatcccaaaaaat

SEQ ID NO: 24699 - RNA, 22 nt, synthetic construct
  source 1..22: mol_type = other RNA
atgagcttccaccttcccaaca

SEQ ID NO: 24700 - RNA, 22 nt, synthetic construct
  source 1..22: mol_type = other RNA
atgagggaaagataccaagtca

SEQ ID NO: 24701 - RNA, 22 nt, synthetic construct
  source 1..22: mol_type = other RNA
atgagtaatttgatgggggcta

SEQ ID NO: 24702 - RNA, 22 nt, synthetic construct
  source 1..22: mol_type = other RNA
atgagtgctgagagggcatcag

SEQ ID NO: 24703 - RNA, 22 nt, synthetic construct
  source 1..22: mol_type = other RNA
atgatttggccccaagatactt

SEQ ID NO: 24704 - RNA, 22 nt, synthetic construct
  source 1..22: mol_type = other RNA
atgcagcgcaatctccagtgac

SEQ ID NO: 24705 - RNA, 22 nt, synthetic construct
  source 1..22: mol_type = other RNA
atgccctctcagcactcatagc

SEQ ID NO: 24706 - RNA, 22 nt, synthetic construct
  source 1..22: mol_type = other RNA
atgcctttctttttggttcctg

SEQ ID NO: 24707 - RNA, 22 nt, synthetic construct
  source 1..22: mol_type = other RNA
atgctatgagtgctgagagggc

SEQ ID NO: 24708 - RNA, 22 nt, synthetic construct
  source 1..22: mol_type = other RNA
atggaaggggtggaaacagagt

SEQ ID NO: 24709 - RNA, 22 nt, synthetic construct
  source 1..22: mol_type = other RNA
atggaatctcattccattgccc

SEQ ID NO: 24710 - RNA, 22 nt, synthetic construct
  source 1..22: mol_type = other RNA
atggaatgagattccatcccaa

SEQ ID NO: 24711 - RNA, 22 nt, synthetic construct
  source 1..22: mol_type = other RNA
atggaattgggagaaatcgatg

SEQ ID NO: 24712 - RNA, 22 nt, synthetic construct
  source 1..22: mol_type = other RNA
atggaggtggcttgttgggaag

SEQ ID NO: 24713 - RNA, 22 nt, synthetic construct
  source 1..22: mol_type = other RNA
atgggggctattatgaactgag

SEQ ID NO: 24714 - RNA, 22 nt, synthetic construct
  source 1..22: mol_type = other RNA
atgggtgtagatcaaggcagga

SEQ ID NO: 24715 - RNA, 22 nt, synthetic construct
  source 1..22: mol_type = other RNA
atggtggtgtgtgcctgtagtc

SEQ ID NO: 24716 - RNA, 22 nt, synthetic construct
  source 1..22: mol_type = other RNA
atgtaaacacttggtgcctgat

SEQ ID NO: 24717 - RNA, 22 nt, synthetic construct
  source 1..22: mol_type = other RNA
atgtagactcttgagtgatgtg

SEQ ID NO: 24718 - RNA, 22 nt, synthetic construct
  source 1..22: mol_type = other RNA
atgtatagaggaattatgaggg

SEQ ID NO: 24719 - RNA, 22 nt, synthetic construct
  source 1..22: mol_type = other RNA
atgtcccaggcactctactaga

SEQ ID NO: 24720 - RNA, 22 nt, synthetic construct
  source 1..22: mol_type = other RNA
atgtgttaaggaatgctatgag

SEQ ID NO: 24721 - RNA, 22 nt, synthetic construct
  source 1..22: mol_type = other RNA
atgttattatctgaggttccta

SEQ ID NO: 24722 - RNA, 22 nt, synthetic construct
  source 1..22: mol_type = other RNA
atgttattgtactctgtttcca

SEQ ID NO: 24723 - RNA, 22 nt, synthetic construct
  source 1..22: mol_type = other RNA
atgtttatgcctttctttttgg

SEQ ID NO: 24724 - RNA, 22 nt, synthetic construct
  source 1..22: mol_type = other RNA
attaatattgccagggtatttc

SEQ ID NO: 24725 - RNA, 22 nt, synthetic construct
  source 1..22: mol_type = other RNA
attaatgtgtcttttcccgata

SEQ ID NO: 24726 - RNA, 22 nt, synthetic construct
  source 1..22: mol_type = other RNA
attactcatgttattgtactct

SEQ ID NO: 24727 - RNA, 22 nt, synthetic construct
  source 1..22: mol_type = other RNA
attatctgaggttcctaagtgg

SEQ ID NO: 24728 - RNA, 22 nt, synthetic construct
  source 1..22: mol_type = other RNA
attatgaactgagaaatgaact

SEQ ID NO: 24729 - RNA, 22 nt, synthetic construct
  source 1..22: mol_type = other RNA
attatgagggaaagataccaag

SEQ ID NO: 24730 - RNA, 22 nt, synthetic construct
  source 1..22: mol_type = other RNA
attccattgcccaggctggagt

SEQ ID NO: 24731 - RNA, 22 nt, synthetic construct
  source 1..22: mol_type = other RNA
attccatttccactctggccaa

SEQ ID NO: 24732 - RNA, 22 nt, synthetic construct
  source 1..22: mol_type = other RNA
attcctctatacatgccttttt

SEQ ID NO: 24733 - RNA, 22 nt, synthetic construct
  source 1..22: mol_type = other RNA
attcctgggactacaggcacac

SEQ ID NO: 24734 - RNA, 22 nt, synthetic construct
  source 1..22: mol_type = other RNA
attccttaacacatcactcaag

SEQ ID NO: 24735 - RNA, 22 nt, synthetic construct
  source 1..22: mol_type = other RNA
attcttcaaaatggaggtggct

SEQ ID NO: 24736 - RNA, 22 nt, synthetic construct
  source 1..22: mol_type = other RNA
attgccagggtatttcacttgg

SEQ ID NO: 24737 - RNA, 22 nt, synthetic construct
  source 1..22: mol_type = other RNA
attgcccaggctggagtgcagt

SEQ ID NO: 24738 - RNA, 22 nt, synthetic construct
  source 1..22: mol_type = other RNA
attgcgctgcatttttaagagc

SEQ ID NO: 24739 - RNA, 22 nt, synthetic construct
  source 1..22: mol_type = other RNA
attgctatgtcccaggcactct

SEQ ID NO: 24740 - RNA, 22 nt, synthetic construct
  source 1..22: mol_type = other RNA
attgctctatacgtggcagatg

SEQ ID NO: 24741 - RNA, 22 nt, synthetic construct
  source 1..22: mol_type = other RNA
attgggagaaatcgatgaccaa

SEQ ID NO: 24742 - RNA, 22 nt, synthetic construct
  source 1..22: mol_type = other RNA
attgtactctgtttccacccct

SEQ ID NO: 24743 - RNA, 22 nt, synthetic construct
  source 1..22: mol_type = other RNA
atttcacttggggctaacttgg

SEQ ID NO: 24744 - RNA, 22 nt, synthetic construct
  source 1..22: mol_type = other RNA
atttccactctggccaaatgag

SEQ ID NO: 24745 - RNA, 22 nt, synthetic construct
  source 1..22: mol_type = other RNA
atttctagcagtatcttctgtc

SEQ ID NO: 24746 - RNA, 22 nt, synthetic construct
  source 1..22: mol_type = other RNA
atttctcagttcataatagccc

SEQ ID NO: 24747 - RNA, 22 nt, synthetic construct
  source 1..22: mol_type = other RNA
atttctcccaattccatttcca

SEQ ID NO: 24748 - RNA, 22 nt, synthetic construct
  source 1..22: mol_type = other RNA
atttgatgggggctattatgaa

SEQ ID NO: 24749 - RNA, 22 nt, synthetic construct
  source 1..22: mol_type = other RNA
atttggccagagtggaaatgga

SEQ ID NO: 24750 - RNA, 22 nt, synthetic construct
  source 1..22: mol_type = other RNA
atttggccccaagatacttttc

SEQ ID NO: 24751 - RNA, 22 nt, synthetic construct
  source 1..22: mol_type = other RNA
atttggtcatcgatttctccca

SEQ ID NO: 24752 - RNA, 22 nt, synthetic construct
  source 1..22: mol_type = other RNA
attttctaaactgtatgaagtg

SEQ ID NO: 24753 - RNA, 22 nt, synthetic construct
  source 1..22: mol_type = other RNA
attttgaagaataaaccgtgac

SEQ ID NO: 24754 - RNA, 22 nt, synthetic construct
  source 1..22: mol_type = other RNA
atttttaagagcctttctctgg

SEQ ID NO: 24755 - RNA, 22 nt, synthetic construct
  source 1..22: mol_type = other RNA
attttttgggatggaatctcat

SEQ ID NO: 24756 - RNA, 22 nt, synthetic construct
  source 1..22: mol_type = other RNA
caaaaaaggcatgtatagagga

SEQ ID NO: 24757 - RNA, 22 nt, synthetic construct
  source 1..22: mol_type = other RNA
caaaaagaaaggcataaacata

SEQ ID NO: 24758 - RNA, 22 nt, synthetic construct
  source 1..22: mol_type = other RNA
caaaatggaggtggcttgttgg

SEQ ID NO: 24759 - RNA, 22 nt, synthetic construct
  source 1..22: mol_type = other RNA
caaagttcatttctcagttcat

SEQ ID NO: 24760 - RNA, 22 nt, synthetic construct
  source 1..22: mol_type = other RNA
caaatcatgtagactcttgagt

SEQ ID NO: 24761 - RNA, 22 nt, synthetic construct
  source 1..22: mol_type = other RNA
caaatgagcttccaccttccca

SEQ ID NO: 24762 - RNA, 22 nt, synthetic construct
  source 1..22: mol_type = other RNA
caaatgtaaacacttggtgcct

SEQ ID NO: 24763 - RNA, 22 nt, synthetic construct
  source 1..22: mol_type = other RNA
caaattactcatgttattgtac

SEQ ID NO: 24764 - RNA, 22 nt, synthetic construct
  source 1..22: mol_type = other RNA
caacaagccacctccattttga

SEQ ID NO: 24765 - RNA, 22 nt, synthetic construct
  source 1..22: mol_type = other RNA
caacccaaggtatgttctttat

SEQ ID NO: 24766 - RNA, 22 nt, synthetic construct
  source 1..22: mol_type = other RNA
caacttcaagtgatcagcctgc

SEQ ID NO: 24767 - RNA, 22 nt, synthetic construct
  source 1..22: mol_type = other RNA
caagagtctacatgatttggcc

SEQ ID NO: 24768 - RNA, 22 nt, synthetic construct
  source 1..22: mol_type = other RNA
caagatacttttcaaagttcat

SEQ ID NO: 24769 - RNA, 22 nt, synthetic construct
  source 1..22: mol_type = other RNA
caagccacctccattttgaaga

SEQ ID NO: 24770 - RNA, 22 nt, synthetic construct
  source 1..22: mol_type = other RNA
caagctatatcaggcaccaagt

SEQ ID NO: 24771 - RNA, 22 nt, synthetic construct
  source 1..22: mol_type = other RNA
caaggacttctgatgccctctc

SEQ ID NO: 24772 - RNA, 22 nt, synthetic construct
  source 1..22: mol_type = other RNA
caaggcaggagcaggaaccaaa

SEQ ID NO: 24773 - RNA, 22 nt, synthetic construct
  source 1..22: mol_type = other RNA
caaggcaggctgatcacttgaa

SEQ ID NO: 24774 - RNA, 22 nt, synthetic construct
  source 1..22: mol_type = other RNA
caagtcacggtttattcttcaa

SEQ ID NO: 24775 - RNA, 22 nt, synthetic construct
  source 1..22: mol_type = other RNA
caagtgaaataccctggcaata

SEQ ID NO: 24776 - RNA, 22 nt, synthetic construct
  source 1..22: mol_type = other RNA
caagtgattcctgggactacag

SEQ ID NO: 24777 - RNA, 22 nt, synthetic construct
  source 1..22: mol_type = other RNA
caagtgtttacatttggtcatc

SEQ ID NO: 24778 - RNA, 22 nt, synthetic construct
  source 1..22: mol_type = other RNA
caagttagccccaagtgaaata

SEQ ID NO: 24779 - RNA, 22 nt, synthetic construct
  source 1..22: mol_type = other RNA
caataacatgagtaatttgatg

SEQ ID NO: 24780 - RNA, 22 nt, synthetic construct
  source 1..22: mol_type = other RNA
caatattaatgtgtcttttccc

SEQ ID NO: 24781 - RNA, 22 nt, synthetic construct
  source 1..22: mol_type = other RNA
caatctccagtgacagaagata

SEQ ID NO: 24782 - RNA, 22 nt, synthetic construct
  source 1..22: mol_type = other RNA
caatggaatgagattccatccc

SEQ ID NO: 24783 - RNA, 22 nt, synthetic construct
  source 1..22: mol_type = other RNA
caattccatttccactctggcc

SEQ ID NO: 24784 - RNA, 22 nt, synthetic construct
  source 1..22: mol_type = other RNA
caattgctatgtcccaggcact

SEQ ID NO: 24785 - RNA, 22 nt, synthetic construct
  source 1..22: mol_type = other RNA
caattgctctatacgtggcaga

SEQ ID NO: 24786 - RNA, 22 nt, synthetic construct
  source 1..22: mol_type = other RNA
cacactgcactccagcctgggc

SEQ ID NO: 24787 - RNA, 22 nt, synthetic construct
  source 1..22: mol_type = other RNA
cacatcactcaagagtctacat

SEQ ID NO: 24788 - RNA, 22 nt, synthetic construct
  source 1..22: mol_type = other RNA
cacattaatattgccagggtat

SEQ ID NO: 24789 - RNA, 22 nt, synthetic construct
  source 1..22: mol_type = other RNA
caccaagtgtttacatttggtc

SEQ ID NO: 24790 - RNA, 22 nt, synthetic construct
  source 1..22: mol_type = other RNA
caccaagttagccccaagtgaa

SEQ ID NO: 24791 - RNA, 22 nt, synthetic construct
  source 1..22: mol_type = other RNA
cacccatctgattttctaaact

SEQ ID NO: 24792 - RNA, 22 nt, synthetic construct
  source 1..22: mol_type = other RNA
cacctccattttgaagaataaa

SEQ ID NO: 24793 - RNA, 22 nt, synthetic construct
  source 1..22: mol_type = other RNA
caccttcccaacaagccacctc

SEQ ID NO: 24794 - RNA, 22 nt, synthetic construct
  source 1..22: mol_type = other RNA
cacggtttattcttcaaaatgg

SEQ ID NO: 24795 - RNA, 22 nt, synthetic construct
  source 1..22: mol_type = other RNA
cacgtatagagcaattgctatg

SEQ ID NO: 24796 - RNA, 22 nt, synthetic construct
  source 1..22: mol_type = other RNA
cactcaagagtctacatgattt

SEQ ID NO: 24797 - RNA, 22 nt, synthetic construct
  source 1..22: mol_type = other RNA
cactcatagcattccttaacac

SEQ ID NO: 24798 - RNA, 22 nt, synthetic construct
  source 1..22: mol_type = other RNA
cactccagcctgggcaatggaa

SEQ ID NO: 24799 - RNA, 22 nt, synthetic construct
  source 1..22: mol_type = other RNA
cactctactagacacttcatac

SEQ ID NO: 24800 - RNA, 22 nt, synthetic construct
  source 1..22: mol_type = other RNA
cactctggccaaatgagcttcc

SEQ ID NO: 24801 - RNA, 22 nt, synthetic construct
  source 1..22: mol_type = other RNA
cactgcacactgcactccagcc

SEQ ID NO: 24802 - RNA, 22 nt, synthetic construct
  source 1..22: mol_type = other RNA
cactggagattgcgctgcattt

SEQ ID NO: 24803 - RNA, 22 nt, synthetic construct
  source 1..22: mol_type = other RNA
cacttaggaacctcagataata

SEQ ID NO: 24804 - RNA, 22 nt, synthetic construct
  source 1..22: mol_type = other RNA
cacttcatacagtttagaaaat

SEQ ID NO: 24805 - RNA, 22 nt, synthetic construct
  source 1..22: mol_type = other RNA
cacttggggctaacttggtgtc

SEQ ID NO: 24806 - RNA, 22 nt, synthetic construct
  source 1..22: mol_type = other RNA
cacttggtgcctgatatagctt

SEQ ID NO: 24807 - RNA, 22 nt, synthetic construct
  source 1..22: mol_type = other RNA
cagaagatactgctagaaatct

SEQ ID NO: 24808 - RNA, 22 nt, synthetic construct
  source 1..22: mol_type = other RNA
cagaagtccttgagagcctcca

SEQ ID NO: 24809 - RNA, 22 nt, synthetic construct
  source 1..22: mol_type = other RNA
cagagaaaggctcttaaaaatg

SEQ ID NO: 24810 - RNA, 22 nt, synthetic construct
  source 1..22: mol_type = other RNA
cagagtacaataacatgagtaa

SEQ ID NO: 24811 - RNA, 22 nt, synthetic construct
  source 1..22: mol_type = other RNA
cagagtggaaatggaattggga

SEQ ID NO: 24812 - RNA, 22 nt, synthetic construct
  source 1..22: mol_type = other RNA
cagataataacatctgccacgt

SEQ ID NO: 24813 - RNA, 22 nt, synthetic construct
  source 1..22: mol_type = other RNA
cagatgggtgtagatcaaggca

SEQ ID NO: 24814 - RNA, 22 nt, synthetic construct
  source 1..22: mol_type = other RNA
cagatgttattatctgaggttc

SEQ ID NO: 24815 - RNA, 22 nt, synthetic construct
  source 1..22: mol_type = other RNA
cagatttctagcagtatcttct

SEQ ID NO: 24816 - RNA, 22 nt, synthetic construct
  source 1..22: mol_type = other RNA
cagcactcatagcattccttaa

SEQ ID NO: 24817 - RNA, 22 nt, synthetic construct
  source 1..22: mol_type = other RNA
cagcctgggcaatggaatgaga

SEQ ID NO: 24818 - RNA, 22 nt, synthetic construct
  source 1..22: mol_type = other RNA
cagcgcaatctccagtgacaga

SEQ ID NO: 24819 - RNA, 22 nt, synthetic construct
  source 1..22: mol_type = other RNA
caggaaccaaaaagaaaggcat

SEQ ID NO: 24820 - RNA, 22 nt, synthetic construct
  source 1..22: mol_type = other RNA
caggagcaggaaccaaaaagaa

SEQ ID NO: 24821 - RNA, 22 nt, synthetic construct
  source 1..22: mol_type = other RNA
caggcaccaagtgtttacattt

SEQ ID NO: 24822 - RNA, 22 nt, synthetic construct
  source 1..22: mol_type = other RNA
caggcactctactagacacttc

SEQ ID NO: 24823 - RNA, 22 nt, synthetic construct
  source 1..22: mol_type = other RNA
caggctgatcacttgaagttgg

SEQ ID NO: 24824 - RNA, 22 nt, synthetic construct
  source 1..22: mol_type = other RNA
caggctggagtgcagtgtgcag

SEQ ID NO: 24825 - RNA, 22 nt, synthetic construct
  source 1..22: mol_type = other RNA
cagggtatttcacttggggcta

SEQ ID NO: 24826 - RNA, 22 nt, synthetic construct
  source 1..22: mol_type = other RNA
cagtatcttctgtcactggaga

SEQ ID NO: 24827 - RNA, 22 nt, synthetic construct
  source 1..22: mol_type = other RNA
cagtgacagaagatactgctag

SEQ ID NO: 24828 - RNA, 22 nt, synthetic construct
  source 1..22: mol_type = other RNA
cagtgagctgagatctcaccac

SEQ ID NO: 24829 - RNA, 22 nt, synthetic construct
  source 1..22: mol_type = other RNA
cagtgtgcagtggtgagatctc

SEQ ID NO: 24830 - RNA, 22 nt, synthetic construct
  source 1..22: mol_type = other RNA
cagttcataatagcccccatca

SEQ ID NO: 24831 - RNA, 22 nt, synthetic construct
  source 1..22: mol_type = other RNA
cagtttagaaaatcagatgggt

SEQ ID NO: 24832 - RNA, 22 nt, synthetic construct
  source 1..22: mol_type = other RNA
cataatagcccccatcaaatta

SEQ ID NO: 24833 - RNA, 22 nt, synthetic construct
  source 1..22: mol_type = other RNA
cataattcctctatacatgcct

SEQ ID NO: 24834 - RNA, 22 nt, synthetic construct
  source 1..22: mol_type = other RNA
catacagtttagaaaatcagat

SEQ ID NO: 24835 - RNA, 22 nt, synthetic construct
  source 1..22: mol_type = other RNA
cataccttgggttgatccactt

SEQ ID NO: 24836 - RNA, 22 nt, synthetic construct
  source 1..22: mol_type = other RNA
catagcaattgctctatacgtg

SEQ ID NO: 24837 - RNA, 22 nt, synthetic construct
  source 1..22: mol_type = other RNA
catagcattccttaacacatca

SEQ ID NO: 24838 - RNA, 22 nt, synthetic construct
  source 1..22: mol_type = other RNA
catcaaattactcatgttattg

SEQ ID NO: 24839 - RNA, 22 nt, synthetic construct
  source 1..22: mol_type = other RNA
catcactcaagagtctacatga

SEQ ID NO: 24840 - RNA, 22 nt, synthetic construct
  source 1..22: mol_type = other RNA
catcagaagtccttgagagcct

SEQ ID NO: 24841 - RNA, 22 nt, synthetic construct
  source 1..22: mol_type = other RNA
catcgatttctcccaattccat

SEQ ID NO: 24842 - RNA, 22 nt, synthetic construct
  source 1..22: mol_type = other RNA
catctgattttctaaactgtat

SEQ ID NO: 24843 - RNA, 22 nt, synthetic construct
  source 1..22: mol_type = other RNA
catctgccacgtatagagcaat

SEQ ID NO: 24844 - RNA, 22 nt, synthetic construct
  source 1..22: mol_type = other RNA
catgagtaatttgatgggggct

SEQ ID NO: 24845 - RNA, 22 nt, synthetic construct
  source 1..22: mol_type = other RNA
catgatttggccccaagatact

SEQ ID NO: 24846 - RNA, 22 nt, synthetic construct
  source 1..22: mol_type = other RNA
catggtggtgtgtgcctgtagt

SEQ ID NO: 24847 - RNA, 22 nt, synthetic construct
  source 1..22: mol_type = other RNA
catgtagactcttgagtgatgt

SEQ ID NO: 24848 - RNA, 22 nt, synthetic construct
  source 1..22: mol_type = other RNA
catgtatagaggaattatgagg

SEQ ID NO: 24849 - RNA, 22 nt, synthetic construct
  source 1..22: mol_type = other RNA
catgttattgtactctgtttcc

SEQ ID NO: 24850 - RNA, 22 nt, synthetic construct
  source 1..22: mol_type = other RNA
cattaatattgccagggtattt

SEQ ID NO: 24851 - RNA, 22 nt, synthetic construct
  source 1..22: mol_type = other RNA
cattccattgcccaggctggag

SEQ ID NO: 24852 - RNA, 22 nt, synthetic construct
  source 1..22: mol_type = other RNA
cattccttaacacatcactcaa

SEQ ID NO: 24853 - RNA, 22 nt, synthetic construct
  source 1..22: mol_type = other RNA
cattgcccaggctggagtgcag

SEQ ID NO: 24854 - RNA, 22 nt, synthetic construct
  source 1..22: mol_type = other RNA
catttccactctggccaaatga

SEQ ID NO: 24855 - RNA, 22 nt, synthetic construct
  source 1..22: mol_type = other RNA
catttctcagttcataatagcc

SEQ ID NO: 24856 - RNA, 22 nt, synthetic construct
  source 1..22: mol_type = other RNA
catttggccagagtggaaatgg

SEQ ID NO: 24857 - RNA, 22 nt, synthetic construct
  source 1..22: mol_type = other RNA
catttggtcatcgatttctccc

SEQ ID NO: 24858 - RNA, 22 nt, synthetic construct
  source 1..22: mol_type = other RNA
cattttgaagaataaaccgtga

SEQ ID NO: 24859 - RNA, 22 nt, synthetic construct
  source 1..22: mol_type = other RNA
catttttaagagcctttctctg

SEQ ID NO: 24860 - RNA, 22 nt, synthetic construct
  source 1..22: mol_type = other RNA
ccaaaaagaaaggcataaacat

SEQ ID NO: 24861 - RNA, 22 nt, synthetic construct
  source 1..22: mol_type = other RNA
ccaaatcatgtagactcttgag

SEQ ID NO: 24862 - RNA, 22 nt, synthetic construct
  source 1..22: mol_type = other RNA
ccaaatgagcttccaccttccc

SEQ ID NO: 24863 - RNA, 22 nt, synthetic construct
  source 1..22: mol_type = other RNA
ccaaatgtaaacacttggtgcc

SEQ ID NO: 24864 - RNA, 22 nt, synthetic construct
  source 1..22: mol_type = other RNA
ccaacaagccacctccattttg

SEQ ID NO: 24865 - RNA, 22 nt, synthetic construct
  source 1..22: mol_type = other RNA
ccaacttcaagtgatcagcctg

SEQ ID NO: 24866 - RNA, 22 nt, synthetic construct
  source 1..22: mol_type = other RNA
ccaagatacttttcaaagttca

SEQ ID NO: 24867 - RNA, 22 nt, synthetic construct
  source 1..22: mol_type = other RNA
ccaaggcaggctgatcacttga

SEQ ID NO: 24868 - RNA, 22 nt, synthetic construct
  source 1..22: mol_type = other RNA
ccaaggtatgttctttattttt

SEQ ID NO: 24869 - RNA, 22 nt, synthetic construct
  source 1..22: mol_type = other RNA
ccaagtcacggtttattcttca

SEQ ID NO: 24870 - RNA, 22 nt, synthetic construct
  source 1..22: mol_type = other RNA
ccaagtgaaataccctggcaat

SEQ ID NO: 24871 - RNA, 22 nt, synthetic construct
  source 1..22: mol_type = other RNA
ccaagtgtttacatttggtcat

SEQ ID NO: 24872 - RNA, 22 nt, synthetic construct
  source 1..22: mol_type = other RNA
ccaagttagccccaagtgaaat

SEQ ID NO: 24873 - RNA, 22 nt, synthetic construct
  source 1..22: mol_type = other RNA
ccaattccatttccactctggc

SEQ ID NO: 24874 - RNA, 22 nt, synthetic construct
  source 1..22: mol_type = other RNA
ccacctccattttgaagaataa

SEQ ID NO: 24875 - RNA, 22 nt, synthetic construct
  source 1..22: mol_type = other RNA
ccaccttcccaacaagccacct

SEQ ID NO: 24876 - RNA, 22 nt, synthetic construct
  source 1..22: mol_type = other RNA
ccacgtatagagcaattgctat

SEQ ID NO: 24877 - RNA, 22 nt, synthetic construct
  source 1..22: mol_type = other RNA
ccactctggccaaatgagcttc

SEQ ID NO: 24878 - RNA, 22 nt, synthetic construct
  source 1..22: mol_type = other RNA
ccacttaggaacctcagataat

SEQ ID NO: 24879 - RNA, 22 nt, synthetic construct
  source 1..22: mol_type = other RNA
ccagagaaaggctcttaaaaat

SEQ ID NO: 24880 - RNA, 22 nt, synthetic construct
  source 1..22: mol_type = other RNA
ccagagtggaaatggaattggg

SEQ ID NO: 24881 - RNA, 22 nt, synthetic construct
  source 1..22: mol_type = other RNA
ccagcctgggcaatggaatgag

SEQ ID NO: 24882 - RNA, 22 nt, synthetic construct
  source 1..22: mol_type = other RNA
ccaggcactctactagacactt

SEQ ID NO: 24883 - RNA, 22 nt, synthetic construct
  source 1..22: mol_type = other RNA
ccaggctggagtgcagtgtgca

SEQ ID NO: 24884 - RNA, 22 nt, synthetic construct
  source 1..22: mol_type = other RNA
ccagggtatttcacttggggct

SEQ ID NO: 24885 - RNA, 22 nt, synthetic construct
  source 1..22: mol_type = other RNA
ccagtgacagaagatactgcta

SEQ ID NO: 24886 - RNA, 22 nt, synthetic construct
  source 1..22: mol_type = other RNA
ccatcaaattactcatgttatt

SEQ ID NO: 24887 - RNA, 22 nt, synthetic construct
  source 1..22: mol_type = other RNA
ccatctgattttctaaactgta

SEQ ID NO: 24888 - RNA, 22 nt, synthetic construct
  source 1..22: mol_type = other RNA
ccattgcccaggctggagtgca

SEQ ID NO: 24889 - RNA, 22 nt, synthetic construct
  source 1..22: mol_type = other RNA
ccatttccactctggccaaatg

SEQ ID NO: 24890 - RNA, 22 nt, synthetic construct
  source 1..22: mol_type = other RNA
ccattttgaagaataaaccgtg

SEQ ID NO: 24891 - RNA, 22 nt, synthetic construct
  source 1..22: mol_type = other RNA
cccaacaagccacctccatttt

SEQ ID NO: 24892 - RNA, 22 nt, synthetic construct
  source 1..22: mol_type = other RNA
cccaacttcaagtgatcagcct

SEQ ID NO: 24893 - RNA, 22 nt, synthetic construct
  source 1..22: mol_type = other RNA
cccaagatacttttcaaagttc

SEQ ID NO: 24894 - RNA, 22 nt, synthetic construct
  source 1..22: mol_type = other RNA
cccaaggtatgttctttatttt

SEQ ID NO: 24895 - RNA, 22 nt, synthetic construct
  source 1..22: mol_type = other RNA
cccaagtgaaataccctggcaa

SEQ ID NO: 24896 - RNA, 22 nt, synthetic construct
  source 1..22: mol_type = other RNA
cccaattccatttccactctgg

SEQ ID NO: 24897 - RNA, 22 nt, synthetic construct
  source 1..22: mol_type = other RNA
cccaggaatcacttgaacccag

SEQ ID NO: 24898 - RNA, 22 nt, synthetic construct
  source 1..22: mol_type = other RNA
cccaggcactctactagacact

SEQ ID NO: 24899 - RNA, 22 nt, synthetic construct
  source 1..22: mol_type = other RNA
cccaggctggagtgcagtgtgc

SEQ ID NO: 24900 - RNA, 22 nt, synthetic construct
  source 1..22: mol_type = other RNA
cccatcaaattactcatgttat

SEQ ID NO: 24901 - RNA, 22 nt, synthetic construct
  source 1..22: mol_type = other RNA
cccatctgattttctaaactgt

SEQ ID NO: 24902 - RNA, 22 nt, synthetic construct
  source 1..22: mol_type = other RNA
ccccaagatacttttcaaagtt

SEQ ID NO: 24903 - RNA, 22 nt, synthetic construct
  source 1..22: mol_type = other RNA
ccccaagtgaaataccctggca

SEQ ID NO: 24904 - RNA, 22 nt, synthetic construct
  source 1..22: mol_type = other RNA
ccccatcaaattactcatgtta

SEQ ID NO: 24905 - RNA, 22 nt, synthetic construct
  source 1..22: mol_type = other RNA
cccccatcaaattactcatgtt

SEQ ID NO: 24906 - RNA, 22 nt, synthetic construct
  source 1..22: mol_type = other RNA
ccctcataattcctctatacat

SEQ ID NO: 24907 - RNA, 22 nt, synthetic construct
  source 1..22: mol_type = other RNA
ccctctcagcactcatagcatt

SEQ ID NO: 24908 - RNA, 22 nt, synthetic construct
  source 1..22: mol_type = other RNA
ccctggcaatattaatgtgtct

SEQ ID NO: 24909 - RNA, 22 nt, synthetic construct
  source 1..22: mol_type = other RNA
ccgcctcctgggttcaagtgat

SEQ ID NO: 24910 - RNA, 22 nt, synthetic construct
  source 1..22: mol_type = other RNA
ccgtgacttggtatctttccct

SEQ ID NO: 24911 - RNA, 22 nt, synthetic construct
  source 1..22: mol_type = other RNA
cctaagtggatcaacccaaggt

SEQ ID NO: 24912 - RNA, 22 nt, synthetic construct
  source 1..22: mol_type = other RNA
cctcagataataacatctgcca

SEQ ID NO: 24913 - RNA, 22 nt, synthetic construct
  source 1..22: mol_type = other RNA
cctcataattcctctatacatg

SEQ ID NO: 24914 - RNA, 22 nt, synthetic construct
  source 1..22: mol_type = other RNA
cctccagagaaaggctcttaaa

SEQ ID NO: 24915 - RNA, 22 nt, synthetic construct
  source 1..22: mol_type = other RNA
cctccattttgaagaataaacc

SEQ ID NO: 24916 - RNA, 22 nt, synthetic construct
  source 1..22: mol_type = other RNA
cctcctgggttcaagtgattcc

SEQ ID NO: 24917 - RNA, 22 nt, synthetic construct
  source 1..22: mol_type = other RNA
cctctatacatgccttttttgt

SEQ ID NO: 24918 - RNA, 22 nt, synthetic construct
  source 1..22: mol_type = other RNA
cctctcagcactcatagcattc

SEQ ID NO: 24919 - RNA, 22 nt, synthetic construct
  source 1..22: mol_type = other RNA
cctgatatagcttgacaccaag

SEQ ID NO: 24920 - RNA, 22 nt, synthetic construct
  source 1..22: mol_type = other RNA
cctgccttgatctacacccatc

SEQ ID NO: 24921 - RNA, 22 nt, synthetic construct
  source 1..22: mol_type = other RNA
cctgctcctgccttgatctaca

SEQ ID NO: 24922 - RNA, 22 nt, synthetic construct
  source 1..22: mol_type = other RNA
cctggcaatattaatgtgtctt

SEQ ID NO: 24923 - RNA, 22 nt, synthetic construct
  source 1..22: mol_type = other RNA
cctgggacatagcaattgctct

SEQ ID NO: 24924 - RNA, 22 nt, synthetic construct
  source 1..22: mol_type = other RNA
cctgggcaatggaatgagattc

SEQ ID NO: 24925 - RNA, 22 nt, synthetic construct
  source 1..22: mol_type = other RNA
cctgggttcaagtgattcctgg

SEQ ID NO: 24926 - RNA, 22 nt, synthetic construct
  source 1..22: mol_type = other RNA
cctgtagtcccaggaatcactt

SEQ ID NO: 24927 - RNA, 22 nt, synthetic construct
  source 1..22: mol_type = other RNA
ccttaacacatcactcaagagt

SEQ ID NO: 24928 - RNA, 22 nt, synthetic construct
  source 1..22: mol_type = other RNA
ccttcccaacaagccacctcca

SEQ ID NO: 24929 - RNA, 22 nt, synthetic construct
  source 1..22: mol_type = other RNA
ccttgagagcctccagagaaag

SEQ ID NO: 24930 - RNA, 22 nt, synthetic construct
  source 1..22: mol_type = other RNA
ccttgatctacacccatctgat

SEQ ID NO: 24931 - RNA, 22 nt, synthetic construct
  source 1..22: mol_type = other RNA
ccttgggttgatccacttagga

SEQ ID NO: 24932 - RNA, 22 nt, synthetic construct
  source 1..22: mol_type = other RNA
cctttctctggaggctctcaag

SEQ ID NO: 24933 - RNA, 22 nt, synthetic construct
  source 1..22: mol_type = other RNA
cctttctttttggttcctgctc

SEQ ID NO: 24934 - RNA, 22 nt, synthetic construct
  source 1..22: mol_type = other RNA
cgatgaccaaatgtaaacactt

SEQ ID NO: 24935 - RNA, 22 nt, synthetic construct
  source 1..22: mol_type = other RNA
cgatttctcccaattccatttc

SEQ ID NO: 24936 - RNA, 22 nt, synthetic construct
  source 1..22: mol_type = other RNA
cgcaatctccagtgacagaaga

SEQ ID NO: 24937 - RNA, 22 nt, synthetic construct
  source 1..22: mol_type = other RNA
cgcctcctgggttcaagtgatt

SEQ ID NO: 24938 - RNA, 22 nt, synthetic construct
  source 1..22: mol_type = other RNA
cgctgcatttttaagagccttt

SEQ ID NO: 24939 - RNA, 22 nt, synthetic construct
  source 1..22: mol_type = other RNA
cgggaaaagacacattaatatt

SEQ ID NO: 24940 - RNA, 22 nt, synthetic construct
  source 1..22: mol_type = other RNA
cggtttattcttcaaaatggag

SEQ ID NO: 24941 - RNA, 22 nt, synthetic construct
  source 1..22: mol_type = other RNA
cgtatagagcaattgctatgtc

SEQ ID NO: 24942 - RNA, 22 nt, synthetic construct
  source 1..22: mol_type = other RNA
cgtgacttggtatctttccctc

SEQ ID NO: 24943 - RNA, 22 nt, synthetic construct
  source 1..22: mol_type = other RNA
cgtggcagatgttattatctga

SEQ ID NO: 24944 - RNA, 22 nt, synthetic construct
  source 1..22: mol_type = other RNA
ctaaactgtatgaagtgtctag

SEQ ID NO: 24945 - RNA, 22 nt, synthetic construct
  source 1..22: mol_type = other RNA
ctaacttggtgtcaagctatat

SEQ ID NO: 24946 - RNA, 22 nt, synthetic construct
  source 1..22: mol_type = other RNA
ctaagtggatcaacccaaggta

SEQ ID NO: 24947 - RNA, 22 nt, synthetic construct
  source 1..22: mol_type = other RNA
ctacacccatctgattttctaa

SEQ ID NO: 24948 - RNA, 22 nt, synthetic construct
  source 1..22: mol_type = other RNA
ctacatgatttggccccaagat

SEQ ID NO: 24949 - RNA, 22 nt, synthetic construct
  source 1..22: mol_type = other RNA
ctactagacacttcatacagtt

SEQ ID NO: 24950 - RNA, 22 nt, synthetic construct
  source 1..22: mol_type = other RNA
ctagacacttcatacagtttag

SEQ ID NO: 24951 - RNA, 22 nt, synthetic construct
  source 1..22: mol_type = other RNA
ctagcagatttctagcagtatc

SEQ ID NO: 24952 - RNA, 22 nt, synthetic construct
  source 1..22: mol_type = other RNA
ctagcagtatcttctgtcactg

SEQ ID NO: 24953 - RNA, 22 nt, synthetic construct
  source 1..22: mol_type = other RNA
ctagtagagtgcctgggacata

SEQ ID NO: 24954 - RNA, 22 nt, synthetic construct
  source 1..22: mol_type = other RNA
ctatacatgccttttttgtttt

SEQ ID NO: 24955 - RNA, 22 nt, synthetic construct
  source 1..22: mol_type = other RNA
ctatacgtggcagatgttatta

SEQ ID NO: 24956 - RNA, 22 nt, synthetic construct
  source 1..22: mol_type = other RNA
ctatatcaggcaccaagtgttt

SEQ ID NO: 24957 - RNA, 22 nt, synthetic construct
  source 1..22: mol_type = other RNA
ctatgagtgctgagagggcatc

SEQ ID NO: 24958 - RNA, 22 nt, synthetic construct
  source 1..22: mol_type = other RNA
ctatgtcccaggcactctacta

SEQ ID NO: 24959 - RNA, 22 nt, synthetic construct
  source 1..22: mol_type = other RNA
ctattatgaactgagaaatgaa

SEQ ID NO: 24960 - RNA, 22 nt, synthetic construct
  source 1..22: mol_type = other RNA
ctcaagagtctacatgatttgg

SEQ ID NO: 24961 - RNA, 22 nt, synthetic construct
  source 1..22: mol_type = other RNA
ctcaaggacttctgatgccctc

SEQ ID NO: 24962 - RNA, 22 nt, synthetic construct
  source 1..22: mol_type = other RNA
ctcaccactgcacactgcactc

SEQ ID NO: 24963 - RNA, 22 nt, synthetic construct
  source 1..22: mol_type = other RNA
ctcagataataacatctgccac

SEQ ID NO: 24964 - RNA, 22 nt, synthetic construct
  source 1..22: mol_type = other RNA
ctcagcactcatagcattcctt

SEQ ID NO: 24965 - RNA, 22 nt, synthetic construct
  source 1..22: mol_type = other RNA
ctcagttcataatagcccccat

SEQ ID NO: 24966 - RNA, 22 nt, synthetic construct
  source 1..22: mol_type = other RNA
ctcataattcctctatacatgc

SEQ ID NO: 24967 - RNA, 22 nt, synthetic construct
  source 1..22: mol_type = other RNA
ctcatagcattccttaacacat

SEQ ID NO: 24968 - RNA, 22 nt, synthetic construct
  source 1..22: mol_type = other RNA
ctcatgttattgtactctgttt

SEQ ID NO: 24969 - RNA, 22 nt, synthetic construct
  source 1..22: mol_type = other RNA
ctcatttggccagagtggaaat

SEQ ID NO: 24970 - RNA, 22 nt, synthetic construct
  source 1..22: mol_type = other RNA
ctccagagaaaggctcttaaaa

SEQ ID NO: 24971 - RNA, 22 nt, synthetic construct
  source 1..22: mol_type = other RNA
ctccagcctgggcaatggaatg

SEQ ID NO: 24972 - RNA, 22 nt, synthetic construct
  source 1..22: mol_type = other RNA
ctccagtgacagaagatactgc

SEQ ID NO: 24973 - RNA, 22 nt, synthetic construct
  source 1..22: mol_type = other RNA
ctccattttgaagaataaaccg

SEQ ID NO: 24974 - RNA, 22 nt, synthetic construct
  source 1..22: mol_type = other RNA
ctcccaacttcaagtgatcagc

SEQ ID NO: 24975 - RNA, 22 nt, synthetic construct
  source 1..22: mol_type = other RNA
ctcccaattccatttccactct

SEQ ID NO: 24976 - RNA, 22 nt, synthetic construct
  source 1..22: mol_type = other RNA
ctcctgccttgatctacaccca

SEQ ID NO: 24977 - RNA, 22 nt, synthetic construct
  source 1..22: mol_type = other RNA
ctcctgggttcaagtgattcct

SEQ ID NO: 24978 - RNA, 22 nt, synthetic construct
  source 1..22: mol_type = other RNA
ctctactagacacttcatacag

SEQ ID NO: 24979 - RNA, 22 nt, synthetic construct
  source 1..22: mol_type = other RNA
ctctatacatgccttttttgtt

SEQ ID NO: 24980 - RNA, 22 nt, synthetic construct
  source 1..22: mol_type = other RNA
ctctatacgtggcagatgttat

SEQ ID NO: 24981 - RNA, 22 nt, synthetic construct
  source 1..22: mol_type = other RNA
ctctcaaggacttctgatgccc

SEQ ID NO: 24982 - RNA, 22 nt, synthetic construct
  source 1..22: mol_type = other RNA
ctctcagcactcatagcattcc

SEQ ID NO: 24983 - RNA, 22 nt, synthetic construct
  source 1..22: mol_type = other RNA
ctctggaggctctcaaggactt

SEQ ID NO: 24984 - RNA, 22 nt, synthetic construct
  source 1..22: mol_type = other RNA
ctctggccaaatgagcttccac

SEQ ID NO: 24985 - RNA, 22 nt, synthetic construct
  source 1..22: mol_type = other RNA
ctctgtttccaccccttccatt

SEQ ID NO: 24986 - RNA, 22 nt, synthetic construct
  source 1..22: mol_type = other RNA
ctcttaaaaatgcagcgcaatc

SEQ ID NO: 24987 - RNA, 22 nt, synthetic construct
  source 1..22: mol_type = other RNA
ctcttgagtgatgtgttaagga

SEQ ID NO: 24988 - RNA, 22 nt, synthetic construct
  source 1..22: mol_type = other RNA
ctgagaaatgaactttgaaaag

SEQ ID NO: 24989 - RNA, 22 nt, synthetic construct
  source 1..22: mol_type = other RNA
ctgagagggcatcagaagtcct

SEQ ID NO: 24990 - RNA, 22 nt, synthetic construct
  source 1..22: mol_type = other RNA
ctgagatctcaccactgcacac

SEQ ID NO: 24991 - RNA, 22 nt, synthetic construct
  source 1..22: mol_type = other RNA
ctgaggaatatcgggaaaagac

SEQ ID NO: 24992 - RNA, 22 nt, synthetic construct
  source 1..22: mol_type = other RNA
ctgaggttcctaagtggatcaa

SEQ ID NO: 24993 - RNA, 22 nt, synthetic construct
  source 1..22: mol_type = other RNA
ctgatatagcttgacaccaagt

SEQ ID NO: 24994 - RNA, 22 nt, synthetic construct
  source 1..22: mol_type = other RNA
ctgatcacttgaagttgggagt

SEQ ID NO: 24995 - RNA, 22 nt, synthetic construct
  source 1..22: mol_type = other RNA
ctgatgccctctcagcactcat

SEQ ID NO: 24996 - RNA, 22 nt, synthetic construct
  source 1..22: mol_type = other RNA
ctgattttctaaactgtatgaa

SEQ ID NO: 24997 - RNA, 22 nt, synthetic construct
  source 1..22: mol_type = other RNA
ctgcacactgcactccagcctg

SEQ ID NO: 24998 - RNA, 22 nt, synthetic construct
  source 1..22: mol_type = other RNA
ctgcatttttaagagcctttct

SEQ ID NO: 24999 - RNA, 22 nt, synthetic construct
  source 1..22: mol_type = other RNA
ctgccacgtatagagcaattgc

SEQ ID NO: 25000 - RNA, 22 nt, synthetic construct
  source 1..22: mol_type = other RNA
ctgccttgatctacacccatct

SEQ ID NO: 25001 - RNA, 22 nt, synthetic construct
  source 1..22: mol_type = other RNA
ctgctagaaatctgctagaaaa

SEQ ID NO: 25002 - RNA, 22 nt, synthetic construct
  source 1..22: mol_type = other RNA
ctgctcctgccttgatctacac

SEQ ID NO: 25003 - RNA, 22 nt, synthetic construct
  source 1..22: mol_type = other RNA
ctggagattgcgctgcattttt

SEQ ID NO: 25004 - RNA, 22 nt, synthetic construct
  source 1..22: mol_type = other RNA
ctggaggctctcaaggacttct

SEQ ID NO: 25005 - RNA, 22 nt, synthetic construct
  source 1..22: mol_type = other RNA
ctggagtgcagtgtgcagtggt

SEQ ID NO: 25006 - RNA, 22 nt, synthetic construct
  source 1..22: mol_type = other RNA
ctggcaatattaatgtgtcttt

SEQ ID NO: 25007 - RNA, 22 nt, synthetic construct
  source 1..22: mol_type = other RNA
ctggccaaatgagcttccacct

SEQ ID NO: 25008 - RNA, 22 nt, synthetic construct
  source 1..22: mol_type = other RNA
ctgggacatagcaattgctcta

SEQ ID NO: 25009 - RNA, 22 nt, synthetic construct
  source 1..22: mol_type = other RNA
ctgggcaatggaatgagattcc

SEQ ID NO: 25010 - RNA, 22 nt, synthetic construct
  source 1..22: mol_type = other RNA
ctgggttcaagtgattcctggg

SEQ ID NO: 25011 - RNA, 22 nt, synthetic construct
  source 1..22: mol_type = other RNA
ctgtagtcccaggaatcacttg

SEQ ID NO: 25012 - RNA, 22 nt, synthetic construct
  source 1..22: mol_type = other RNA
ctgtatgaagtgtctagtagag

SEQ ID NO: 25013 - RNA, 22 nt, synthetic construct
  source 1..22: mol_type = other RNA
ctgtcactggagattgcgctgc

SEQ ID NO: 25014 - RNA, 22 nt, synthetic construct
  source 1..22: mol_type = other RNA
ctgtttccaccccttccatttt

SEQ ID NO: 25015 - RNA, 22 nt, synthetic construct
  source 1..22: mol_type = other RNA
cttaaaaatgcagcgcaatctc

SEQ ID NO: 25016 - RNA, 22 nt, synthetic construct
  source 1..22: mol_type = other RNA
cttaacacatcactcaagagtc

SEQ ID NO: 25017 - RNA, 22 nt, synthetic construct
  source 1..22: mol_type = other RNA
cttaggaacctcagataataac

SEQ ID NO: 25018 - RNA, 22 nt, synthetic construct
  source 1..22: mol_type = other RNA
cttatgtttatgcctttctttt

SEQ ID NO: 25019 - RNA, 22 nt, synthetic construct
  source 1..22: mol_type = other RNA
cttcaaaatggaggtggcttgt

SEQ ID NO: 25020 - RNA, 22 nt, synthetic construct
  source 1..22: mol_type = other RNA
cttcaagtgatcagcctgcctt

SEQ ID NO: 25021 - RNA, 22 nt, synthetic construct
  source 1..22: mol_type = other RNA
cttcatacagtttagaaaatca

SEQ ID NO: 25022 - RNA, 22 nt, synthetic construct
  source 1..22: mol_type = other RNA
cttccaccttcccaacaagcca

SEQ ID NO: 25023 - RNA, 22 nt, synthetic construct
  source 1..22: mol_type = other RNA
cttcccaacaagccacctccat

SEQ ID NO: 25024 - RNA, 22 nt, synthetic construct
  source 1..22: mol_type = other RNA
cttctgatgccctctcagcact

SEQ ID NO: 25025 - RNA, 22 nt, synthetic construct
  source 1..22: mol_type = other RNA
cttctgtcactggagattgcgc

SEQ ID NO: 25026 - RNA, 22 nt, synthetic construct
  source 1..22: mol_type = other RNA
cttgaactcccaacttcaagtg

SEQ ID NO: 25027 - RNA, 22 nt, synthetic construct
  source 1..22: mol_type = other RNA
cttgacaccaagttagccccaa

SEQ ID NO: 25028 - RNA, 22 nt, synthetic construct
  source 1..22: mol_type = other RNA
cttgagagcctccagagaaagg

SEQ ID NO: 25029 - RNA, 22 nt, synthetic construct
  source 1..22: mol_type = other RNA
cttgagtgatgtgttaaggaat

SEQ ID NO: 25030 - RNA, 22 nt, synthetic construct
  source 1..22: mol_type = other RNA
cttgatctacacccatctgatt

SEQ ID NO: 25031 - RNA, 22 nt, synthetic construct
  source 1..22: mol_type = other RNA
cttggggccaaatcatgtagac

SEQ ID NO: 25032 - RNA, 22 nt, synthetic construct
  source 1..22: mol_type = other RNA
cttggggctaacttggtgtcaa

SEQ ID NO: 25033 - RNA, 22 nt, synthetic construct
  source 1..22: mol_type = other RNA
cttgggttgatccacttaggaa

SEQ ID NO: 25034 - RNA, 22 nt, synthetic construct
  source 1..22: mol_type = other RNA
cttggtatctttccctcataat

SEQ ID NO: 25035 - RNA, 22 nt, synthetic construct
  source 1..22: mol_type = other RNA
cttggtgcctgatatagcttga

SEQ ID NO: 25036 - RNA, 22 nt, synthetic construct
  source 1..22: mol_type = other RNA
cttggtgtcaagctatatcagg

SEQ ID NO: 25037 - RNA, 22 nt, synthetic construct
  source 1..22: mol_type = other RNA
cttgttgggaaggtggaagctc

SEQ ID NO: 25038 - RNA, 22 nt, synthetic construct
  source 1..22: mol_type = other RNA
ctttccctcataattcctctat

SEQ ID NO: 25039 - RNA, 22 nt, synthetic construct
  source 1..22: mol_type = other RNA
ctttctctggaggctctcaagg

SEQ ID NO: 25040 - RNA, 22 nt, synthetic construct
  source 1..22: mol_type = other RNA
ctttctttttggttcctgctcc

SEQ ID NO: 25041 - RNA, 22 nt, synthetic construct
  source 1..22: mol_type = other RNA
ctttgaaaagtatcttggggcc

SEQ ID NO: 25042 - RNA, 22 nt, synthetic construct
  source 1..22: mol_type = other RNA
cttttcaaagttcatttctcag

SEQ ID NO: 25043 - RNA, 22 nt, synthetic construct
  source 1..22: mol_type = other RNA
ctttttggttcctgctcctgcc

SEQ ID NO: 25044 - RNA, 22 nt, synthetic construct
  source 1..22: mol_type = other RNA
gaaaagacacattaatattgcc

SEQ ID NO: 25045 - RNA, 22 nt, synthetic construct
  source 1..22: mol_type = other RNA
gaaaagtatcttggggccaaat

SEQ ID NO: 25046 - RNA, 22 nt, synthetic construct
  source 1..22: mol_type = other RNA
gaaaatcagatgggtgtagatc

SEQ ID NO: 25047 - RNA, 22 nt, synthetic construct
  source 1..22: mol_type = other RNA
gaaacagagtacaataacatga

SEQ ID NO: 25048 - RNA, 22 nt, synthetic construct
  source 1..22: mol_type = other RNA
gaaagataccaagtcacggttt

SEQ ID NO: 25049 - RNA, 22 nt, synthetic construct
  source 1..22: mol_type = other RNA
gaaaggcataaacataagaaaa

SEQ ID NO: 25050 - RNA, 22 nt, synthetic construct
  source 1..22: mol_type = other RNA
gaaaggctcttaaaaatgcagc

SEQ ID NO: 25051 - RNA, 22 nt, synthetic construct
  source 1..22: mol_type = other RNA
gaaataccctggcaatattaat

SEQ ID NO: 25052 - RNA, 22 nt, synthetic construct
  source 1..22: mol_type = other RNA
gaaatcgatgaccaaatgtaaa

SEQ ID NO: 25053 - RNA, 22 nt, synthetic construct
  source 1..22: mol_type = other RNA
gaaatgaactttgaaaagtatc

SEQ ID NO: 25054 - RNA, 22 nt, synthetic construct
  source 1..22: mol_type = other RNA
gaaatggaattgggagaaatcg

SEQ ID NO: 25055 - RNA, 22 nt, synthetic construct
  source 1..22: mol_type = other RNA
gaacataccttgggttgatcca

SEQ ID NO: 25056 - RNA, 22 nt, synthetic construct
  source 1..22: mol_type = other RNA
gaaccaaaaagaaaggcataaa

SEQ ID NO: 25057 - RNA, 22 nt, synthetic construct
  source 1..22: mol_type = other RNA
gaacctcagataataacatctg

SEQ ID NO: 25058 - RNA, 22 nt, synthetic construct
  source 1..22: mol_type = other RNA
gaactcccaacttcaagtgatc

SEQ ID NO: 25059 - RNA, 22 nt, synthetic construct
  source 1..22: mol_type = other RNA
gaactgagaaatgaactttgaa

SEQ ID NO: 25060 - RNA, 22 nt, synthetic construct
  source 1..22: mol_type = other RNA
gaactttgaaaagtatcttggg

SEQ ID NO: 25061 - RNA, 22 nt, synthetic construct
  source 1..22: mol_type = other RNA
gaagaataaaccgtgacttggt

SEQ ID NO: 25062 - RNA, 22 nt, synthetic construct
  source 1..22: mol_type = other RNA
gaagatactgctagaaatctgc

SEQ ID NO: 25063 - RNA, 22 nt, synthetic construct
  source 1..22: mol_type = other RNA
gaagctcatttggccagagtgg

SEQ ID NO: 25064 - RNA, 22 nt, synthetic construct
  source 1..22: mol_type = other RNA
gaaggggtggaaacagagtaca

SEQ ID NO: 25065 - RNA, 22 nt, synthetic construct
  source 1..22: mol_type = other RNA
gaaggtggaagctcatttggcc

SEQ ID NO: 25066 - RNA, 22 nt, synthetic construct
  source 1..22: mol_type = other RNA
gaagtccttgagagcctccaga

SEQ ID NO: 25067 - RNA, 22 nt, synthetic construct
  source 1..22: mol_type = other RNA
gaagtgtctagtagagtgcctg

SEQ ID NO: 25068 - RNA, 22 nt, synthetic construct
  source 1..22: mol_type = other RNA
gaataaaccgtgacttggtatc

SEQ ID NO: 25069 - RNA, 22 nt, synthetic construct
  source 1..22: mol_type = other RNA
gaatatcgggaaaagacacatt

SEQ ID NO: 25070 - RNA, 22 nt, synthetic construct
  source 1..22: mol_type = other RNA
gaatctcattccattgcccagg

SEQ ID NO: 25071 - RNA, 22 nt, synthetic construct
  source 1..22: mol_type = other RNA
gaatgagattccatcccaaaaa

SEQ ID NO: 25072 - RNA, 22 nt, synthetic construct
  source 1..22: mol_type = other RNA
gaatgctatgagtgctgagagg

SEQ ID NO: 25073 - RNA, 22 nt, synthetic construct
  source 1..22: mol_type = other RNA
gaattatgagggaaagatacca

SEQ ID NO: 25074 - RNA, 22 nt, synthetic construct
  source 1..22: mol_type = other RNA
gaattgggagaaatcgatgacc

SEQ ID NO: 25075 - RNA, 22 nt, synthetic construct
  source 1..22: mol_type = other RNA
gacacattaatattgccagggt

SEQ ID NO: 25076 - RNA, 22 nt, synthetic construct
  source 1..22: mol_type = other RNA
gacaccaagttagccccaagtg

SEQ ID NO: 25077 - RNA, 22 nt, synthetic construct
  source 1..22: mol_type = other RNA
gacacttcatacagtttagaaa

SEQ ID NO: 25078 - RNA, 22 nt, synthetic construct
  source 1..22: mol_type = other RNA
gacagaagatactgctagaaat

SEQ ID NO: 25079 - RNA, 22 nt, synthetic construct
  source 1..22: mol_type = other RNA
gacatagcaattgctctatacg

SEQ ID NO: 25080 - RNA, 22 nt, synthetic construct
  source 1..22: mol_type = other RNA
gaccaaatgtaaacacttggtg

SEQ ID NO: 25081 - RNA, 22 nt, synthetic construct
  source 1..22: mol_type = other RNA
gactcttgagtgatgtgttaag

SEQ ID NO: 25082 - RNA, 22 nt, synthetic construct
  source 1..22: mol_type = other RNA
gacttctgatgccctctcagca

SEQ ID NO: 25083 - RNA, 22 nt, synthetic construct
  source 1..22: mol_type = other RNA
gacttggtatctttccctcata

SEQ ID NO: 25084 - RNA, 22 nt, synthetic construct
  source 1..22: mol_type = other RNA
gagaaaggctcttaaaaatgca

SEQ ID NO: 25085 - RNA, 22 nt, synthetic construct
  source 1..22: mol_type = other RNA
gagaaatcgatgaccaaatgta

SEQ ID NO: 25086 - RNA, 22 nt, synthetic construct
  source 1..22: mol_type = other RNA
gagaaatgaactttgaaaagta

SEQ ID NO: 25087 - RNA, 22 nt, synthetic construct
  source 1..22: mol_type = other RNA
gagagcctccagagaaaggctc

SEQ ID NO: 25088 - RNA, 22 nt, synthetic construct
  source 1..22: mol_type = other RNA
gagagggcatcagaagtccttg

SEQ ID NO: 25089 - RNA, 22 nt, synthetic construct
  source 1..22: mol_type = other RNA
gagatctcaccactgcacactg

SEQ ID NO: 25090 - RNA, 22 nt, synthetic construct
  source 1..22: mol_type = other RNA
gagattccatcccaaaaaataa

SEQ ID NO: 25091 - RNA, 22 nt, synthetic construct
  source 1..22: mol_type = other RNA
gagattgcgctgcatttttaag

SEQ ID NO: 25092 - RNA, 22 nt, synthetic construct
  source 1..22: mol_type = other RNA
gagcaattgctatgtcccaggc

SEQ ID NO: 25093 - RNA, 22 nt, synthetic construct
  source 1..22: mol_type = other RNA
gagcaggaaccaaaaagaaagg

SEQ ID NO: 25094 - RNA, 22 nt, synthetic construct
  source 1..22: mol_type = other RNA
gagcctccagagaaaggctctt

SEQ ID NO: 25095 - RNA, 22 nt, synthetic construct
  source 1..22: mol_type = other RNA
gagcctttctctggaggctctc

SEQ ID NO: 25096 - RNA, 22 nt, synthetic construct
  source 1..22: mol_type = other RNA
gagctgagatctcaccactgca

SEQ ID NO: 25097 - RNA, 22 nt, synthetic construct
  source 1..22: mol_type = other RNA
gagcttccaccttcccaacaag

SEQ ID NO: 25098 - RNA, 22 nt, synthetic construct
  source 1..22: mol_type = other RNA
gaggaatatcgggaaaagacac

SEQ ID NO: 25099 - RNA, 22 nt, synthetic construct
  source 1..22: mol_type = other RNA
gaggaattatgagggaaagata

SEQ ID NO: 25100 - RNA, 22 nt, synthetic construct
  source 1..22: mol_type = other RNA
gaggccaaggcaggctgatcac

SEQ ID NO: 25101 - RNA, 22 nt, synthetic construct
  source 1..22: mol_type = other RNA
gaggctctcaaggacttctgat

SEQ ID NO: 25102 - RNA, 22 nt, synthetic construct
  source 1..22: mol_type = other RNA
gagggaaagataccaagtcacg

SEQ ID NO: 25103 - RNA, 22 nt, synthetic construct
  source 1..22: mol_type = other RNA
gagggcatcagaagtccttgag

SEQ ID NO: 25104 - RNA, 22 nt, synthetic construct
  source 1..22: mol_type = other RNA
gaggtggcttgttgggaaggtg

SEQ ID NO: 25105 - RNA, 22 nt, synthetic construct
  source 1..22: mol_type = other RNA
gaggttcctaagtggatcaacc

SEQ ID NO: 25106 - RNA, 22 nt, synthetic construct
  source 1..22: mol_type = other RNA
gagtaatttgatgggggctatt

SEQ ID NO: 25107 - RNA, 22 nt, synthetic construct
  source 1..22: mol_type = other RNA
gagtacaataacatgagtaatt

SEQ ID NO: 25108 - RNA, 22 nt, synthetic construct
  source 1..22: mol_type = other RNA
gagtctacatgatttggcccca

SEQ ID NO: 25109 - RNA, 22 nt, synthetic construct
  source 1..22: mol_type = other RNA
gagtgatgtgttaaggaatgct

SEQ ID NO: 25110 - RNA, 22 nt, synthetic construct
  source 1..22: mol_type = other RNA
gagtgcagtgtgcagtggtgag

SEQ ID NO: 25111 - RNA, 22 nt, synthetic construct
  source 1..22: mol_type = other RNA
gagtgcctgggacatagcaatt

SEQ ID NO: 25112 - RNA, 22 nt, synthetic construct
  source 1..22: mol_type = other RNA
gagtgctgagagggcatcagaa

SEQ ID NO: 25113 - RNA, 22 nt, synthetic construct
  source 1..22: mol_type = other RNA
gagtggaaatggaattgggaga

SEQ ID NO: 25114 - RNA, 22 nt, synthetic construct
  source 1..22: mol_type = other RNA
gataataacatctgccacgtat

SEQ ID NO: 25115 - RNA, 22 nt, synthetic construct
  source 1..22: mol_type = other RNA
gataccaagtcacggtttattc

SEQ ID NO: 25116 - RNA, 22 nt, synthetic construct
  source 1..22: mol_type = other RNA
gatactgctagaaatctgctag

SEQ ID NO: 25117 - RNA, 22 nt, synthetic construct
  source 1..22: mol_type = other RNA
gatacttttcaaagttcatttc

SEQ ID NO: 25118 - RNA, 22 nt, synthetic construct
  source 1..22: mol_type = other RNA
gatatagcttgacaccaagtta

SEQ ID NO: 25119 - RNA, 22 nt, synthetic construct
  source 1..22: mol_type = other RNA
gatcaacccaaggtatgttctt

SEQ ID NO: 25120 - RNA, 22 nt, synthetic construct
  source 1..22: mol_type = other RNA
gatcaaggcaggagcaggaacc

SEQ ID NO: 25121 - RNA, 22 nt, synthetic construct
  source 1..22: mol_type = other RNA
gatccacttaggaacctcagat

SEQ ID NO: 25122 - RNA, 22 nt, synthetic construct
  source 1..22: mol_type = other RNA
gatctacacccatctgattttc

SEQ ID NO: 25123 - RNA, 22 nt, synthetic construct
  source 1..22: mol_type = other RNA
gatctcaccactgcacactgca

SEQ ID NO: 25124 - RNA, 22 nt, synthetic construct
  source 1..22: mol_type = other RNA
gatgaccaaatgtaaacacttg

SEQ ID NO: 25125 - RNA, 22 nt, synthetic construct
  source 1..22: mol_type = other RNA
gatgccctctcagcactcatag

SEQ ID NO: 25126 - RNA, 22 nt, synthetic construct
  source 1..22: mol_type = other RNA
gatggaatctcattccattgcc

SEQ ID NO: 25127 - RNA, 22 nt, synthetic construct
  source 1..22: mol_type = other RNA
gatgggggctattatgaactga

SEQ ID NO: 25128 - RNA, 22 nt, synthetic construct
  source 1..22: mol_type = other RNA
gatgggtgtagatcaaggcagg

SEQ ID NO: 25129 - RNA, 22 nt, synthetic construct
  source 1..22: mol_type = other RNA
gatgtgttaaggaatgctatga

SEQ ID NO: 25130 - RNA, 22 nt, synthetic construct
  source 1..22: mol_type = other RNA
gatgttattatctgaggttcct

SEQ ID NO: 25131 - RNA, 22 nt, synthetic construct
  source 1..22: mol_type = other RNA
gattccatcccaaaaaataaaa

SEQ ID NO: 25132 - RNA, 22 nt, synthetic construct
  source 1..22: mol_type = other RNA
gattcctgggactacaggcaca

SEQ ID NO: 25133 - RNA, 22 nt, synthetic construct
  source 1..22: mol_type = other RNA
gattgcgctgcatttttaagag

SEQ ID NO: 25134 - RNA, 22 nt, synthetic construct
  source 1..22: mol_type = other RNA
gatttctagcagtatcttctgt

SEQ ID NO: 25135 - RNA, 22 nt, synthetic construct
  source 1..22: mol_type = other RNA
gatttctcccaattccatttcc

SEQ ID NO: 25136 - RNA, 22 nt, synthetic construct
  source 1..22: mol_type = other RNA
gatttggccccaagatactttt

SEQ ID NO: 25137 - RNA, 22 nt, synthetic construct
  source 1..22: mol_type = other RNA
gattttctaaactgtatgaagt

SEQ ID NO: 25138 - RNA, 22 nt, synthetic construct
  source 1..22: mol_type = other RNA
gcaatattaatgtgtcttttcc

SEQ ID NO: 25139 - RNA, 22 nt, synthetic construct
  source 1..22: mol_type = other RNA
gcaatctccagtgacagaagat

SEQ ID NO: 25140 - RNA, 22 nt, synthetic construct
  source 1..22: mol_type = other RNA
gcaatggaatgagattccatcc

SEQ ID NO: 25141 - RNA, 22 nt, synthetic construct
  source 1..22: mol_type = other RNA
gcaattgctatgtcccaggcac

SEQ ID NO: 25142 - RNA, 22 nt, synthetic construct
  source 1..22: mol_type = other RNA
gcaattgctctatacgtggcag

SEQ ID NO: 25143 - RNA, 22 nt, synthetic construct
  source 1..22: mol_type = other RNA
gcacactgcactccagcctggg

SEQ ID NO: 25144 - RNA, 22 nt, synthetic construct
  source 1..22: mol_type = other RNA
gcaccaagtgtttacatttggt

SEQ ID NO: 25145 - RNA, 22 nt, synthetic construct
  source 1..22: mol_type = other RNA
gcactcatagcattccttaaca

SEQ ID NO: 25146 - RNA, 22 nt, synthetic construct
  source 1..22: mol_type = other RNA
gcactccagcctgggcaatgga

SEQ ID NO: 25147 - RNA, 22 nt, synthetic construct
  source 1..22: mol_type = other RNA
gcactctactagacacttcata

SEQ ID NO: 25148 - RNA, 22 nt, synthetic construct
  source 1..22: mol_type = other RNA
gcagatgttattatctgaggtt

SEQ ID NO: 25149 - RNA, 22 nt, synthetic construct
  source 1..22: mol_type = other RNA
gcagatttctagcagtatcttc

SEQ ID NO: 25150 - RNA, 22 nt, synthetic construct
  source 1..22: mol_type = other RNA
gcagcgcaatctccagtgacag

SEQ ID NO: 25151 - RNA, 22 nt, synthetic construct
  source 1..22: mol_type = other RNA
gcaggaaccaaaaagaaaggca

SEQ ID NO: 25152 - RNA, 22 nt, synthetic construct
  source 1..22: mol_type = other RNA
gcaggagcaggaaccaaaaaga

SEQ ID NO: 25153 - RNA, 22 nt, synthetic construct
  source 1..22: mol_type = other RNA
gcaggctgatcacttgaagttg

SEQ ID NO: 25154 - RNA, 22 nt, synthetic construct
  source 1..22: mol_type = other RNA
gcagtatcttctgtcactggag

SEQ ID NO: 25155 - RNA, 22 nt, synthetic construct
  source 1..22: mol_type = other RNA
gcagtgagctgagatctcacca

SEQ ID NO: 25156 - RNA, 22 nt, synthetic construct
  source 1..22: mol_type = other RNA
gcagtgtgcagtggtgagatct

SEQ ID NO: 25157 - RNA, 22 nt, synthetic construct
  source 1..22: mol_type = other RNA
gcatcagaagtccttgagagcc

SEQ ID NO: 25158 - RNA, 22 nt, synthetic construct
  source 1..22: mol_type = other RNA
gcatgtatagaggaattatgag

SEQ ID NO: 25159 - RNA, 22 nt, synthetic construct
  source 1..22: mol_type = other RNA
gcattccttaacacatcactca

SEQ ID NO: 25160 - RNA, 22 nt, synthetic construct
  source 1..22: mol_type = other RNA
gcatttttaagagcctttctct

SEQ ID NO: 25161 - RNA, 22 nt, synthetic construct
  source 1..22: mol_type = other RNA
gccaaatcatgtagactcttga

SEQ ID NO: 25162 - RNA, 22 nt, synthetic construct
  source 1..22: mol_type = other RNA
gccaaatgagcttccaccttcc

SEQ ID NO: 25163 - RNA, 22 nt, synthetic construct
  source 1..22: mol_type = other RNA
gccaaggcaggctgatcacttg

SEQ ID NO: 25164 - RNA, 22 nt, synthetic construct
  source 1..22: mol_type = other RNA
gccacctccattttgaagaata

SEQ ID NO: 25165 - RNA, 22 nt, synthetic construct
  source 1..22: mol_type = other RNA
gccacgtatagagcaattgcta

SEQ ID NO: 25166 - RNA, 22 nt, synthetic construct
  source 1..22: mol_type = other RNA
gccagagtggaaatggaattgg

SEQ ID NO: 25167 - RNA, 22 nt, synthetic construct
  source 1..22: mol_type = other RNA
gccagggtatttcacttggggc

SEQ ID NO: 25168 - RNA, 22 nt, synthetic construct
  source 1..22: mol_type = other RNA
gccccaagatacttttcaaagt

SEQ ID NO: 25169 - RNA, 22 nt, synthetic construct
  source 1..22: mol_type = other RNA
gccccaagtgaaataccctggc

SEQ ID NO: 25170 - RNA, 22 nt, synthetic construct
  source 1..22: mol_type = other RNA
gcccccatcaaattactcatgt

SEQ ID NO: 25171 - RNA, 22 nt, synthetic construct
  source 1..22: mol_type = other RNA
gccctctcagcactcatagcat

SEQ ID NO: 25172 - RNA, 22 nt, synthetic construct
  source 1..22: mol_type = other RNA
gcctccagagaaaggctcttaa

SEQ ID NO: 25173 - RNA, 22 nt, synthetic construct
  source 1..22: mol_type = other RNA
gcctcctgggttcaagtgattc

SEQ ID NO: 25174 - RNA, 22 nt, synthetic construct
  source 1..22: mol_type = other RNA
gcctgatatagcttgacaccaa

SEQ ID NO: 25175 - RNA, 22 nt, synthetic construct
  source 1..22: mol_type = other RNA
gcctgggacatagcaattgctc

SEQ ID NO: 25176 - RNA, 22 nt, synthetic construct
  source 1..22: mol_type = other RNA
gcctgggcaatggaatgagatt

SEQ ID NO: 25177 - RNA, 22 nt, synthetic construct
  source 1..22: mol_type = other RNA
gcctgtagtcccaggaatcact

SEQ ID NO: 25178 - RNA, 22 nt, synthetic construct
  source 1..22: mol_type = other RNA
gccttgatctacacccatctga

SEQ ID NO: 25179 - RNA, 22 nt, synthetic construct
  source 1..22: mol_type = other RNA
gcctttctctggaggctctcaa

SEQ ID NO: 25180 - RNA, 22 nt, synthetic construct
  source 1..22: mol_type = other RNA
gcctttctttttggttcctgct

SEQ ID NO: 25181 - RNA, 22 nt, synthetic construct
  source 1..22: mol_type = other RNA
gcgcaatctccagtgacagaag

SEQ ID NO: 25182 - RNA, 22 nt, synthetic construct
  source 1..22: mol_type = other RNA
gcgctgcatttttaagagcctt

SEQ ID NO: 25183 - RNA, 22 nt, synthetic construct
  source 1..22: mol_type = other RNA
gctaacttggtgtcaagctata

SEQ ID NO: 25184 - RNA, 22 nt, synthetic construct
  source 1..22: mol_type = other RNA
gctagaaatctgctagaaaaaa

SEQ ID NO: 25185 - RNA, 22 nt, synthetic construct
  source 1..22: mol_type = other RNA
gctatatcaggcaccaagtgtt

SEQ ID NO: 25186 - RNA, 22 nt, synthetic construct
  source 1..22: mol_type = other RNA
gctatgagtgctgagagggcat

SEQ ID NO: 25187 - RNA, 22 nt, synthetic construct
  source 1..22: mol_type = other RNA
gctatgtcccaggcactctact

SEQ ID NO: 25188 - RNA, 22 nt, synthetic construct
  source 1..22: mol_type = other RNA
gctattatgaactgagaaatga

SEQ ID NO: 25189 - RNA, 22 nt, synthetic construct
  source 1..22: mol_type = other RNA
gctcatttggccagagtggaaa

SEQ ID NO: 25190 - RNA, 22 nt, synthetic construct
  source 1..22: mol_type = other RNA
gctcctgccttgatctacaccc

SEQ ID NO: 25191 - RNA, 22 nt, synthetic construct
  source 1..22: mol_type = other RNA
gctctatacgtggcagatgtta

SEQ ID NO: 25192 - RNA, 22 nt, synthetic construct
  source 1..22: mol_type = other RNA
gctctcaaggacttctgatgcc

SEQ ID NO: 25193 - RNA, 22 nt, synthetic construct
  source 1..22: mol_type = other RNA
gctcttaaaaatgcagcgcaat

SEQ ID NO: 25194 - RNA, 22 nt, synthetic construct
  source 1..22: mol_type = other RNA
gctgagagggcatcagaagtcc

SEQ ID NO: 25195 - RNA, 22 nt, synthetic construct
  source 1..22: mol_type = other RNA
gctgagatctcaccactgcaca

SEQ ID NO: 25196 - RNA, 22 nt, synthetic construct
  source 1..22: mol_type = other RNA
gctgatcacttgaagttgggag

SEQ ID NO: 25197 - RNA, 22 nt, synthetic construct
  source 1..22: mol_type = other RNA
gctgcatttttaagagcctttc

SEQ ID NO: 25198 - RNA, 22 nt, synthetic construct
  source 1..22: mol_type = other RNA
gctggagtgcagtgtgcagtgg

SEQ ID NO: 25199 - RNA, 22 nt, synthetic construct
  source 1..22: mol_type = other RNA
gcttccaccttcccaacaagcc

SEQ ID NO: 25200 - RNA, 22 nt, synthetic construct
  source 1..22: mol_type = other RNA
gcttgacaccaagttagcccca

SEQ ID NO: 25201 - RNA, 22 nt, synthetic construct
  source 1..22: mol_type = other RNA
gcttgttgggaaggtggaagct

SEQ ID NO: 25202 - RNA, 22 nt, synthetic construct
  source 1..22: mol_type = other RNA
ggaaaagacacattaatattgc

SEQ ID NO: 25203 - RNA, 22 nt, synthetic construct
  source 1..22: mol_type = other RNA
ggaaacagagtacaataacatg

SEQ ID NO: 25204 - RNA, 22 nt, synthetic construct
  source 1..22: mol_type = other RNA
ggaaagataccaagtcacggtt

SEQ ID NO: 25205 - RNA, 22 nt, synthetic construct
  source 1..22: mol_type = other RNA
ggaaatggaattgggagaaatc

SEQ ID NO: 25206 - RNA, 22 nt, synthetic construct
  source 1..22: mol_type = other RNA
ggaaccaaaaagaaaggcataa

SEQ ID NO: 25207 - RNA, 22 nt, synthetic construct
  source 1..22: mol_type = other RNA
ggaacctcagataataacatct

SEQ ID NO: 25208 - RNA, 22 nt, synthetic construct
  source 1..22: mol_type = other RNA
ggaagctcatttggccagagtg

SEQ ID NO: 25209 - RNA, 22 nt, synthetic construct
  source 1..22: mol_type = other RNA
ggaaggggtggaaacagagtac

SEQ ID NO: 25210 - RNA, 22 nt, synthetic construct
  source 1..22: mol_type = other RNA
ggaaggtggaagctcatttggc

SEQ ID NO: 25211 - RNA, 22 nt, synthetic construct
  source 1..22: mol_type = other RNA
ggaatatcgggaaaagacacat

SEQ ID NO: 25212 - RNA, 22 nt, synthetic construct
  source 1..22: mol_type = other RNA
ggaatctcattccattgcccag

SEQ ID NO: 25213 - RNA, 22 nt, synthetic construct
  source 1..22: mol_type = other RNA
ggaatgagattccatcccaaaa

SEQ ID NO: 25214 - RNA, 22 nt, synthetic construct
  source 1..22: mol_type = other RNA
ggaatgctatgagtgctgagag

SEQ ID NO: 25215 - RNA, 22 nt, synthetic construct
  source 1..22: mol_type = other RNA
ggaattatgagggaaagatacc

SEQ ID NO: 25216 - RNA, 22 nt, synthetic construct
  source 1..22: mol_type = other RNA
ggaattgggagaaatcgatgac

SEQ ID NO: 25217 - RNA, 22 nt, synthetic construct
  source 1..22: mol_type = other RNA
ggacatagcaattgctctatac

SEQ ID NO: 25218 - RNA, 22 nt, synthetic construct
  source 1..22: mol_type = other RNA
ggacttctgatgccctctcagc

SEQ ID NO: 25219 - RNA, 22 nt, synthetic construct
  source 1..22: mol_type = other RNA
ggagaaatcgatgaccaaatgt

SEQ ID NO: 25220 - RNA, 22 nt, synthetic construct
  source 1..22: mol_type = other RNA
ggagattgcgctgcatttttaa

SEQ ID NO: 25221 - RNA, 22 nt, synthetic construct
  source 1..22: mol_type = other RNA
ggagcaggaaccaaaaagaaag

SEQ ID NO: 25222 - RNA, 22 nt, synthetic construct
  source 1..22: mol_type = other RNA
ggaggccaaggcaggctgatca

SEQ ID NO: 25223 - RNA, 22 nt, synthetic construct
  source 1..22: mol_type = other RNA
ggaggctctcaaggacttctga

SEQ ID NO: 25224 - RNA, 22 nt, synthetic construct
  source 1..22: mol_type = other RNA
ggaggtggcttgttgggaaggt

SEQ ID NO: 25225 - RNA, 22 nt, synthetic construct
  source 1..22: mol_type = other RNA
ggagtgcagtgtgcagtggtga

SEQ ID NO: 25226 - RNA, 22 nt, synthetic construct
  source 1..22: mol_type = other RNA
ggatcaacccaaggtatgttct

SEQ ID NO: 25227 - RNA, 22 nt, synthetic construct
  source 1..22: mol_type = other RNA
ggatggaatctcattccattgc

SEQ ID NO: 25228 - RNA, 22 nt, synthetic construct
  source 1..22: mol_type = other RNA
ggcaatattaatgtgtcttttc

SEQ ID NO: 25229 - RNA, 22 nt, synthetic construct
  source 1..22: mol_type = other RNA
ggcaatggaatgagattccatc

SEQ ID NO: 25230 - RNA, 22 nt, synthetic construct
  source 1..22: mol_type = other RNA
ggcaccaagtgtttacatttgg

SEQ ID NO: 25231 - RNA, 22 nt, synthetic construct
  source 1..22: mol_type = other RNA
ggcactctactagacacttcat

SEQ ID NO: 25232 - RNA, 22 nt, synthetic construct
  source 1..22: mol_type = other RNA
ggcagatgttattatctgaggt

SEQ ID NO: 25233 - RNA, 22 nt, synthetic construct
  source 1..22: mol_type = other RNA
ggcaggagcaggaaccaaaaag

SEQ ID NO: 25234 - RNA, 22 nt, synthetic construct
  source 1..22: mol_type = other RNA
ggcaggctgatcacttgaagtt

SEQ ID NO: 25235 - RNA, 22 nt, synthetic construct
  source 1..22: mol_type = other RNA
ggcatcagaagtccttgagagc

SEQ ID NO: 25236 - RNA, 22 nt, synthetic construct
  source 1..22: mol_type = other RNA
ggcatgtatagaggaattatga

SEQ ID NO: 25237 - RNA, 22 nt, synthetic construct
  source 1..22: mol_type = other RNA
ggccaaatcatgtagactcttg

SEQ ID NO: 25238 - RNA, 22 nt, synthetic construct
  source 1..22: mol_type = other RNA
ggccaaatgagcttccaccttc

SEQ ID NO: 25239 - RNA, 22 nt, synthetic construct
  source 1..22: mol_type = other RNA
ggccaaggcaggctgatcactt

SEQ ID NO: 25240 - RNA, 22 nt, synthetic construct
  source 1..22: mol_type = other RNA
ggccagagtggaaatggaattg

SEQ ID NO: 25241 - RNA, 22 nt, synthetic construct
  source 1..22: mol_type = other RNA
ggccccaagatacttttcaaag

SEQ ID NO: 25242 - RNA, 22 nt, synthetic construct
  source 1..22: mol_type = other RNA
ggctaacttggtgtcaagctat

SEQ ID NO: 25243 - RNA, 22 nt, synthetic construct
  source 1..22: mol_type = other RNA
ggctattatgaactgagaaatg

SEQ ID NO: 25244 - RNA, 22 nt, synthetic construct
  source 1..22: mol_type = other RNA
ggctctcaaggacttctgatgc

SEQ ID NO: 25245 - RNA, 22 nt, synthetic construct
  source 1..22: mol_type = other RNA
ggctcttaaaaatgcagcgcaa

SEQ ID NO: 25246 - RNA, 22 nt, synthetic construct
  source 1..22: mol_type = other RNA
ggctgatcacttgaagttggga

SEQ ID NO: 25247 - RNA, 22 nt, synthetic construct
  source 1..22: mol_type = other RNA
ggctggagtgcagtgtgcagtg

SEQ ID NO: 25248 - RNA, 22 nt, synthetic construct
  source 1..22: mol_type = other RNA
ggcttgttgggaaggtggaagc

SEQ ID NO: 25249 - RNA, 22 nt, synthetic construct
  source 1..22: mol_type = other RNA
gggaaaagacacattaatattg

SEQ ID NO: 25250 - RNA, 22 nt, synthetic construct
  source 1..22: mol_type = other RNA
gggaaagataccaagtcacggt

SEQ ID NO: 25251 - RNA, 22 nt, synthetic construct
  source 1..22: mol_type = other RNA
gggaaggtggaagctcatttgg

SEQ ID NO: 25252 - RNA, 22 nt, synthetic construct
  source 1..22: mol_type = other RNA
gggacatagcaattgctctata

SEQ ID NO: 25253 - RNA, 22 nt, synthetic construct
  source 1..22: mol_type = other RNA
gggagaaatcgatgaccaaatg

SEQ ID NO: 25254 - RNA, 22 nt, synthetic construct
  source 1..22: mol_type = other RNA
gggaggccaaggcaggctgatc

SEQ ID NO: 25255 - RNA, 22 nt, synthetic construct
  source 1..22: mol_type = other RNA
gggatggaatctcattccattg

SEQ ID NO: 25256 - RNA, 22 nt, synthetic construct
  source 1..22: mol_type = other RNA
gggcaatggaatgagattccat

SEQ ID NO: 25257 - RNA, 22 nt, synthetic construct
  source 1..22: mol_type = other RNA
gggcatcagaagtccttgagag

SEQ ID NO: 25258 - RNA, 22 nt, synthetic construct
  source 1..22: mol_type = other RNA
gggccaaatcatgtagactctt

SEQ ID NO: 25259 - RNA, 22 nt, synthetic construct
  source 1..22: mol_type = other RNA
gggctaacttggtgtcaagcta

SEQ ID NO: 25260 - RNA, 22 nt, synthetic construct
  source 1..22: mol_type = other RNA
gggctattatgaactgagaaat

SEQ ID NO: 25261 - RNA, 22 nt, synthetic construct
  source 1..22: mol_type = other RNA
ggggccaaatcatgtagactct

SEQ ID NO: 25262 - RNA, 22 nt, synthetic construct
  source 1..22: mol_type = other RNA
ggggctaacttggtgtcaagct

SEQ ID NO: 25263 - RNA, 22 nt, synthetic construct
  source 1..22: mol_type = other RNA
ggggctattatgaactgagaaa

SEQ ID NO: 25264 - RNA, 22 nt, synthetic construct
  source 1..22: mol_type = other RNA
gggggctattatgaactgagaa

SEQ ID NO: 25265 - RNA, 22 nt, synthetic construct
  source 1..22: mol_type = other RNA
ggggtggaaacagagtacaata

SEQ ID NO: 25266 - RNA, 22 nt, synthetic construct
  source 1..22: mol_type = other RNA
gggtatttcacttggggctaac

SEQ ID NO: 25267 - RNA, 22 nt, synthetic construct
  source 1..22: mol_type = other RNA
gggtggaaacagagtacaataa

SEQ ID NO: 25268 - RNA, 22 nt, synthetic construct
  source 1..22: mol_type = other RNA
gggtgtagatcaaggcaggagc

SEQ ID NO: 25269 - RNA, 22 nt, synthetic construct
  source 1..22: mol_type = other RNA
gggttcaagtgattcctgggac

SEQ ID NO: 25270 - RNA, 22 nt, synthetic construct
  source 1..22: mol_type = other RNA
gggttgatccacttaggaacct

SEQ ID NO: 25271 - RNA, 22 nt, synthetic construct
  source 1..22: mol_type = other RNA
ggtatctttccctcataattcc

SEQ ID NO: 25272 - RNA, 22 nt, synthetic construct
  source 1..22: mol_type = other RNA
ggtatttcacttggggctaact

SEQ ID NO: 25273 - RNA, 22 nt, synthetic construct
  source 1..22: mol_type = other RNA
ggtcatcgatttctcccaattc

SEQ ID NO: 25274 - RNA, 22 nt, synthetic construct
  source 1..22: mol_type = other RNA
ggtcttgaactcccaacttcaa

SEQ ID NO: 25275 - RNA, 22 nt, synthetic construct
  source 1..22: mol_type = other RNA
ggtgcctgatatagcttgacac

SEQ ID NO: 25276 - RNA, 22 nt, synthetic construct
  source 1..22: mol_type = other RNA
ggtggaaacagagtacaataac

SEQ ID NO: 25277 - RNA, 22 nt, synthetic construct
  source 1..22: mol_type = other RNA
ggtggaagctcatttggccaga

SEQ ID NO: 25278 - RNA, 22 nt, synthetic construct
  source 1..22: mol_type = other RNA
ggtggcttgttgggaaggtgga

SEQ ID NO: 25279 - RNA, 22 nt, synthetic construct
  source 1..22: mol_type = other RNA
ggtggtgtgtgcctgtagtccc

SEQ ID NO: 25280 - RNA, 22 nt, synthetic construct
  source 1..22: mol_type = other RNA
ggtgtagatcaaggcaggagca

SEQ ID NO: 25281 - RNA, 22 nt, synthetic construct
  source 1..22: mol_type = other RNA
ggtgtcaagctatatcaggcac

SEQ ID NO: 25282 - RNA, 22 nt, synthetic construct
  source 1..22: mol_type = other RNA
ggtgtgtgcctgtagtcccagg

SEQ ID NO: 25283 - RNA, 22 nt, synthetic construct
  source 1..22: mol_type = other RNA
ggttcaagtgattcctgggact

SEQ ID NO: 25284 - RNA, 22 nt, synthetic construct
  source 1..22: mol_type = other RNA
ggttcctaagtggatcaaccca

SEQ ID NO: 25285 - RNA, 22 nt, synthetic construct
  source 1..22: mol_type = other RNA
ggttcctgctcctgccttgatc

SEQ ID NO: 25286 - RNA, 22 nt, synthetic construct
  source 1..22: mol_type = other RNA
ggttgatccacttaggaacctc

SEQ ID NO: 25287 - RNA, 22 nt, synthetic construct
  source 1..22: mol_type = other RNA
ggtttattcttcaaaatggagg

SEQ ID NO: 25288 - RNA, 22 nt, synthetic construct
  source 1..22: mol_type = other RNA
gtaaacacttggtgcctgatat

SEQ ID NO: 25289 - RNA, 22 nt, synthetic construct
  source 1..22: mol_type = other RNA
gtaatttgatgggggctattat

SEQ ID NO: 25290 - RNA, 22 nt, synthetic construct
  source 1..22: mol_type = other RNA
gtacaataacatgagtaatttg

SEQ ID NO: 25291 - RNA, 22 nt, synthetic construct
  source 1..22: mol_type = other RNA
gtactctgtttccaccccttcc

SEQ ID NO: 25292 - RNA, 22 nt, synthetic construct
  source 1..22: mol_type = other RNA
gtagactcttgagtgatgtgtt

SEQ ID NO: 25293 - RNA, 22 nt, synthetic construct
  source 1..22: mol_type = other RNA
gtagagtgcctgggacatagca

SEQ ID NO: 25294 - RNA, 22 nt, synthetic construct
  source 1..22: mol_type = other RNA
gtagatcaaggcaggagcagga

SEQ ID NO: 25295 - RNA, 22 nt, synthetic construct
  source 1..22: mol_type = other RNA
gtagtcccaggaatcacttgaa

SEQ ID NO: 25296 - RNA, 22 nt, synthetic construct
  source 1..22: mol_type = other RNA
gtatagagcaattgctatgtcc

SEQ ID NO: 25297 - RNA, 22 nt, synthetic construct
  source 1..22: mol_type = other RNA
gtatagaggaattatgagggaa

SEQ ID NO: 25298 - RNA, 22 nt, synthetic construct
  source 1..22: mol_type = other RNA
gtatcttctgtcactggagatt

SEQ ID NO: 25299 - RNA, 22 nt, synthetic construct
  source 1..22: mol_type = other RNA
gtatcttggggccaaatcatgt

SEQ ID NO: 25300 - RNA, 22 nt, synthetic construct
  source 1..22: mol_type = other RNA
gtatctttccctcataattcct

SEQ ID NO: 25301 - RNA, 22 nt, synthetic construct
  source 1..22: mol_type = other RNA
gtatgaagtgtctagtagagtg

SEQ ID NO: 25302 - RNA, 22 nt, synthetic construct
  source 1..22: mol_type = other RNA
gtatttcacttggggctaactt

SEQ ID NO: 25303 - RNA, 22 nt, synthetic construct
  source 1..22: mol_type = other RNA
gtcaagctatatcaggcaccaa

SEQ ID NO: 25304 - RNA, 22 nt, synthetic construct
  source 1..22: mol_type = other RNA
gtcacggtttattcttcaaaat

SEQ ID NO: 25305 - RNA, 22 nt, synthetic construct
  source 1..22: mol_type = other RNA
gtcactggagattgcgctgcat

SEQ ID NO: 25306 - RNA, 22 nt, synthetic construct
  source 1..22: mol_type = other RNA
gtcatcgatttctcccaattcc

SEQ ID NO: 25307 - RNA, 22 nt, synthetic construct
  source 1..22: mol_type = other RNA
gtcccaggaatcacttgaaccc

SEQ ID NO: 25308 - RNA, 22 nt, synthetic construct
  source 1..22: mol_type = other RNA
gtcccaggcactctactagaca

SEQ ID NO: 25309 - RNA, 22 nt, synthetic construct
  source 1..22: mol_type = other RNA
gtccttgagagcctccagagaa

SEQ ID NO: 25310 - RNA, 22 nt, synthetic construct
  source 1..22: mol_type = other RNA
gtctacatgatttggccccaag

SEQ ID NO: 25311 - RNA, 22 nt, synthetic construct
  source 1..22: mol_type = other RNA
gtctagtagagtgcctgggaca

SEQ ID NO: 25312 - RNA, 22 nt, synthetic construct
  source 1..22: mol_type = other RNA
gtcttgaactcccaacttcaag

SEQ ID NO: 25313 - RNA, 22 nt, synthetic construct
  source 1..22: mol_type = other RNA
gtgaaataccctggcaatatta

SEQ ID NO: 25314 - RNA, 22 nt, synthetic construct
  source 1..22: mol_type = other RNA
gtgacagaagatactgctagaa

SEQ ID NO: 25315 - RNA, 22 nt, synthetic construct
  source 1..22: mol_type = other RNA
gtgacttggtatctttccctca

SEQ ID NO: 25316 - RNA, 22 nt, synthetic construct
  source 1..22: mol_type = other RNA
gtgagctgagatctcaccactg

SEQ ID NO: 25317 - RNA, 22 nt, synthetic construct
  source 1..22: mol_type = other RNA
gtgatgtgttaaggaatgctat

SEQ ID NO: 25318 - RNA, 22 nt, synthetic construct
  source 1..22: mol_type = other RNA
gtgattcctgggactacaggca

SEQ ID NO: 25319 - RNA, 22 nt, synthetic construct
  source 1..22: mol_type = other RNA
gtgcagtgtgcagtggtgagat

SEQ ID NO: 25320 - RNA, 22 nt, synthetic construct
  source 1..22: mol_type = other RNA
gtgcctgatatagcttgacacc

SEQ ID NO: 25321 - RNA, 22 nt, synthetic construct
  source 1..22: mol_type = other RNA
gtgcctgggacatagcaattgc

SEQ ID NO: 25322 - RNA, 22 nt, synthetic construct
  source 1..22: mol_type = other RNA
gtgcctgtagtcccaggaatca

SEQ ID NO: 25323 - RNA, 22 nt, synthetic construct
  source 1..22: mol_type = other RNA
gtgctgagagggcatcagaagt

SEQ ID NO: 25324 - RNA, 22 nt, synthetic construct
  source 1..22: mol_type = other RNA
gtggaaacagagtacaataaca

SEQ ID NO: 25325 - RNA, 22 nt, synthetic construct
  source 1..22: mol_type = other RNA
gtggaaatggaattgggagaaa

SEQ ID NO: 25326 - RNA, 22 nt, synthetic construct
  source 1..22: mol_type = other RNA
gtggaagctcatttggccagag

SEQ ID NO: 25327 - RNA, 22 nt, synthetic construct
  source 1..22: mol_type = other RNA
gtggatcaacccaaggtatgtt

SEQ ID NO: 25328 - RNA, 22 nt, synthetic construct
  source 1..22: mol_type = other RNA
gtggcagatgttattatctgag

SEQ ID NO: 25329 - RNA, 22 nt, synthetic construct
  source 1..22: mol_type = other RNA
gtggcttgttgggaaggtggaa

SEQ ID NO: 25330 - RNA, 22 nt, synthetic construct
  source 1..22: mol_type = other RNA
gtggtgtgtgcctgtagtccca

SEQ ID NO: 25331 - RNA, 22 nt, synthetic construct
  source 1..22: mol_type = other RNA
gtgtagatcaaggcaggagcag

SEQ ID NO: 25332 - RNA, 22 nt, synthetic construct
  source 1..22: mol_type = other RNA
gtgtcaagctatatcaggcacc

SEQ ID NO: 25333 - RNA, 22 nt, synthetic construct
  source 1..22: mol_type = other RNA
gtgtctagtagagtgcctggga

SEQ ID NO: 25334 - RNA, 22 nt, synthetic construct
  source 1..22: mol_type = other RNA
gtgtgcagtggtgagatctcag

SEQ ID NO: 25335 - RNA, 22 nt, synthetic construct
  source 1..22: mol_type = other RNA
gtgtgcctgtagtcccaggaat

SEQ ID NO: 25336 - RNA, 22 nt, synthetic construct
  source 1..22: mol_type = other RNA
gtgtgtgcctgtagtcccagga

SEQ ID NO: 25337 - RNA, 22 nt, synthetic construct
  source 1..22: mol_type = other RNA
gtgttaaggaatgctatgagtg

SEQ ID NO: 25338 - RNA, 22 nt, synthetic construct
  source 1..22: mol_type = other RNA
gtgtttacatttggtcatcgat

SEQ ID NO: 25339 - RNA, 22 nt, synthetic construct
  source 1..22: mol_type = other RNA
gttaaggaatgctatgagtgct

SEQ ID NO: 25340 - RNA, 22 nt, synthetic construct
  source 1..22: mol_type = other RNA
gttagccccaagtgaaataccc

SEQ ID NO: 25341 - RNA, 22 nt, synthetic construct
  source 1..22: mol_type = other RNA
gttattatctgaggttcctaag

SEQ ID NO: 25342 - RNA, 22 nt, synthetic construct
  source 1..22: mol_type = other RNA
gttattgtactctgtttccacc

SEQ ID NO: 25343 - RNA, 22 nt, synthetic construct
  source 1..22: mol_type = other RNA
gttcaagtgattcctgggacta

SEQ ID NO: 25344 - RNA, 22 nt, synthetic construct
  source 1..22: mol_type = other RNA
gttcataatagcccccatcaaa

SEQ ID NO: 25345 - RNA, 22 nt, synthetic construct
  source 1..22: mol_type = other RNA
gttcatttctcagttcataata

SEQ ID NO: 25346 - RNA, 22 nt, synthetic construct
  source 1..22: mol_type = other RNA
gttcctaagtggatcaacccaa

SEQ ID NO: 25347 - RNA, 22 nt, synthetic construct
  source 1..22: mol_type = other RNA
gttcctgctcctgccttgatct

SEQ ID NO: 25348 - RNA, 22 nt, synthetic construct
  source 1..22: mol_type = other RNA
gttgatccacttaggaacctca

SEQ ID NO: 25349 - RNA, 22 nt, synthetic construct
  source 1..22: mol_type = other RNA
gttgggaaggtggaagctcatt

SEQ ID NO: 25350 - RNA, 22 nt, synthetic construct
  source 1..22: mol_type = other RNA
gtttacatttggtcatcgattt

SEQ ID NO: 25351 - RNA, 22 nt, synthetic construct
  source 1..22: mol_type = other RNA
gtttagaaaatcagatgggtgt

SEQ ID NO: 25352 - RNA, 22 nt, synthetic construct
  source 1..22: mol_type = other RNA
gtttatgcctttctttttggtt

SEQ ID NO: 25353 - RNA, 22 nt, synthetic construct
  source 1..22: mol_type = other RNA
gtttattcttcaaaatggaggt

SEQ ID NO: 25354 - RNA, 22 nt, synthetic construct
  source 1..22: mol_type = other RNA
gtttccaccccttccatttttt

SEQ ID NO: 25355 - RNA, 22 nt, synthetic construct
  source 1..22: mol_type = other RNA
taaaaatgcagcgcaatctcca

SEQ ID NO: 25356 - RNA, 22 nt, synthetic construct
  source 1..22: mol_type = other RNA
taaacacttggtgcctgatata

SEQ ID NO: 25357 - RNA, 22 nt, synthetic construct
  source 1..22: mol_type = other RNA
taaaccgtgacttggtatcttt

SEQ ID NO: 25358 - RNA, 22 nt, synthetic construct
  source 1..22: mol_type = other RNA
taaactgtatgaagtgtctagt

SEQ ID NO: 25359 - RNA, 22 nt, synthetic construct
  source 1..22: mol_type = other RNA
taaagaacataccttgggttga

SEQ ID NO: 25360 - RNA, 22 nt, synthetic construct
  source 1..22: mol_type = other RNA
taacacatcactcaagagtcta

SEQ ID NO: 25361 - RNA, 22 nt, synthetic construct
  source 1..22: mol_type = other RNA
taacatctgccacgtatagagc

SEQ ID NO: 25362 - RNA, 22 nt, synthetic construct
  source 1..22: mol_type = other RNA
taacatgagtaatttgatgggg

SEQ ID NO: 25363 - RNA, 22 nt, synthetic construct
  source 1..22: mol_type = other RNA
taacttggtgtcaagctatatc

SEQ ID NO: 25364 - RNA, 22 nt, synthetic construct
  source 1..22: mol_type = other RNA
taagagcctttctctggaggct

SEQ ID NO: 25365 - RNA, 22 nt, synthetic construct
  source 1..22: mol_type = other RNA
taaggaatgctatgagtgctga

SEQ ID NO: 25366 - RNA, 22 nt, synthetic construct
  source 1..22: mol_type = other RNA
taagtggatcaacccaaggtat

SEQ ID NO: 25367 - RNA, 22 nt, synthetic construct
  source 1..22: mol_type = other RNA
taataacatctgccacgtatag

SEQ ID NO: 25368 - RNA, 22 nt, synthetic construct
  source 1..22: mol_type = other RNA
taatagcccccatcaaattact

SEQ ID NO: 25369 - RNA, 22 nt, synthetic construct
  source 1..22: mol_type = other RNA
taatattgccagggtatttcac

SEQ ID NO: 25370 - RNA, 22 nt, synthetic construct
  source 1..22: mol_type = other RNA
taattcctctatacatgccttt

SEQ ID NO: 25371 - RNA, 22 nt, synthetic construct
  source 1..22: mol_type = other RNA
taatttgatgggggctattatg

SEQ ID NO: 25372 - RNA, 22 nt, synthetic construct
  source 1..22: mol_type = other RNA
tacacccatctgattttctaaa

SEQ ID NO: 25373 - RNA, 22 nt, synthetic construct
  source 1..22: mol_type = other RNA
tacagtttagaaaatcagatgg

SEQ ID NO: 25374 - RNA, 22 nt, synthetic construct
  source 1..22: mol_type = other RNA
tacatgatttggccccaagata

SEQ ID NO: 25375 - RNA, 22 nt, synthetic construct
  source 1..22: mol_type = other RNA
tacatttggtcatcgatttctc

SEQ ID NO: 25376 - RNA, 22 nt, synthetic construct
  source 1..22: mol_type = other RNA
taccaagtcacggtttattctt

SEQ ID NO: 25377 - RNA, 22 nt, synthetic construct
  source 1..22: mol_type = other RNA
taccctggcaatattaatgtgt

SEQ ID NO: 25378 - RNA, 22 nt, synthetic construct
  source 1..22: mol_type = other RNA
taccttgggttgatccacttag

SEQ ID NO: 25379 - RNA, 22 nt, synthetic construct
  source 1..22: mol_type = other RNA
tacgtggcagatgttattatct

SEQ ID NO: 25380 - RNA, 22 nt, synthetic construct
  source 1..22: mol_type = other RNA
tactagacacttcatacagttt

SEQ ID NO: 25381 - RNA, 22 nt, synthetic construct
  source 1..22: mol_type = other RNA
tactcatgttattgtactctgt

SEQ ID NO: 25382 - RNA, 22 nt, synthetic construct
  source 1..22: mol_type = other RNA
tactctgtttccaccccttcca

SEQ ID NO: 25383 - RNA, 22 nt, synthetic construct
  source 1..22: mol_type = other RNA
tactgctagaaatctgctagaa

SEQ ID NO: 25384 - RNA, 22 nt, synthetic construct
  source 1..22: mol_type = other RNA
tacttttcaaagttcatttctc

SEQ ID NO: 25385 - RNA, 22 nt, synthetic construct
  source 1..22: mol_type = other RNA
tagaaaatcagatgggtgtaga

SEQ ID NO: 25386 - RNA, 22 nt, synthetic construct
  source 1..22: mol_type = other RNA
tagacacttcatacagtttaga

SEQ ID NO: 25387 - RNA, 22 nt, synthetic construct
  source 1..22: mol_type = other RNA
tagactcttgagtgatgtgtta

SEQ ID NO: 25388 - RNA, 22 nt, synthetic construct
  source 1..22: mol_type = other RNA
tagagcaattgctatgtcccag

SEQ ID NO: 25389 - RNA, 22 nt, synthetic construct
  source 1..22: mol_type = other RNA
tagaggaattatgagggaaaga

SEQ ID NO: 25390 - RNA, 22 nt, synthetic construct
  source 1..22: mol_type = other RNA
tagagtgcctgggacatagcaa

SEQ ID NO: 25391 - RNA, 22 nt, synthetic construct
  source 1..22: mol_type = other RNA
tagatcaaggcaggagcaggaa

SEQ ID NO: 25392 - RNA, 22 nt, synthetic construct
  source 1..22: mol_type = other RNA
tagcaattgctctatacgtggc

SEQ ID NO: 25393 - RNA, 22 nt, synthetic construct
  source 1..22: mol_type = other RNA
tagcagatttctagcagtatct

SEQ ID NO: 25394 - RNA, 22 nt, synthetic construct
  source 1..22: mol_type = other RNA
tagcagtatcttctgtcactgg

SEQ ID NO: 25395 - RNA, 22 nt, synthetic construct
  source 1..22: mol_type = other RNA
tagcattccttaacacatcact

SEQ ID NO: 25396 - RNA, 22 nt, synthetic construct
  source 1..22: mol_type = other RNA
tagccccaagtgaaataccctg

SEQ ID NO: 25397 - RNA, 22 nt, synthetic construct
  source 1..22: mol_type = other RNA
tagcccccatcaaattactcat

SEQ ID NO: 25398 - RNA, 22 nt, synthetic construct
  source 1..22: mol_type = other RNA
tagcttgacaccaagttagccc

SEQ ID NO: 25399 - RNA, 22 nt, synthetic construct
  source 1..22: mol_type = other RNA
taggaacctcagataataacat

SEQ ID NO: 25400 - RNA, 22 nt, synthetic construct
  source 1..22: mol_type = other RNA
tagtagagtgcctgggacatag

SEQ ID NO: 25401 - RNA, 22 nt, synthetic construct
  source 1..22: mol_type = other RNA
tagtcccaggaatcacttgaac

SEQ ID NO: 25402 - RNA, 22 nt, synthetic construct
  source 1..22: mol_type = other RNA
tatacgtggcagatgttattat

SEQ ID NO: 25403 - RNA, 22 nt, synthetic construct
  source 1..22: mol_type = other RNA
tatagagcaattgctatgtccc

SEQ ID NO: 25404 - RNA, 22 nt, synthetic construct
  source 1..22: mol_type = other RNA
tatagaggaattatgagggaaa

SEQ ID NO: 25405 - RNA, 22 nt, synthetic construct
  source 1..22: mol_type = other RNA
tatagcttgacaccaagttagc

SEQ ID NO: 25406 - RNA, 22 nt, synthetic construct
  source 1..22: mol_type = other RNA
tatatcaggcaccaagtgttta

SEQ ID NO: 25407 - RNA, 22 nt, synthetic construct
  source 1..22: mol_type = other RNA
tatcaggcaccaagtgtttaca

SEQ ID NO: 25408 - RNA, 22 nt, synthetic construct
  source 1..22: mol_type = other RNA
tatcgggaaaagacacattaat

SEQ ID NO: 25409 - RNA, 22 nt, synthetic construct
  source 1..22: mol_type = other RNA
tatctgaggttcctaagtggat

SEQ ID NO: 25410 - RNA, 22 nt, synthetic construct
  source 1..22: mol_type = other RNA
tatcttctgtcactggagattg

SEQ ID NO: 25411 - RNA, 22 nt, synthetic construct
  source 1..22: mol_type = other RNA
tatcttggggccaaatcatgta

SEQ ID NO: 25412 - RNA, 22 nt, synthetic construct
  source 1..22: mol_type = other RNA
tatctttccctcataattcctc

SEQ ID NO: 25413 - RNA, 22 nt, synthetic construct
  source 1..22: mol_type = other RNA
tatgaactgagaaatgaacttt

SEQ ID NO: 25414 - RNA, 22 nt, synthetic construct
  source 1..22: mol_type = other RNA
tatgaagtgtctagtagagtgc

SEQ ID NO: 25415 - RNA, 22 nt, synthetic construct
  source 1..22: mol_type = other RNA
tatgagggaaagataccaagtc

SEQ ID NO: 25416 - RNA, 22 nt, synthetic construct
  source 1..22: mol_type = other RNA
tatgagtgctgagagggcatca

SEQ ID NO: 25417 - RNA, 22 nt, synthetic construct
  source 1..22: mol_type = other RNA
tatgcctttctttttggttcct

SEQ ID NO: 25418 - RNA, 22 nt, synthetic construct
  source 1..22: mol_type = other RNA
tatgtcccaggcactctactag

SEQ ID NO: 25419 - RNA, 22 nt, synthetic construct
  source 1..22: mol_type = other RNA
tatgtttatgcctttctttttg

SEQ ID NO: 25420 - RNA, 22 nt, synthetic construct
  source 1..22: mol_type = other RNA
tattaatgtgtcttttcccgat

SEQ ID NO: 25421 - RNA, 22 nt, synthetic construct
  source 1..22: mol_type = other RNA
tattatctgaggttcctaagtg

SEQ ID NO: 25422 - RNA, 22 nt, synthetic construct
  source 1..22: mol_type = other RNA
tattatgaactgagaaatgaac

SEQ ID NO: 25423 - RNA, 22 nt, synthetic construct
  source 1..22: mol_type = other RNA
tattcttcaaaatggaggtggc

SEQ ID NO: 25424 - RNA, 22 nt, synthetic construct
  source 1..22: mol_type = other RNA
tattgccagggtatttcacttg

SEQ ID NO: 25425 - RNA, 22 nt, synthetic construct
  source 1..22: mol_type = other RNA
tattgtactctgtttccacccc

SEQ ID NO: 25426 - RNA, 22 nt, synthetic construct
  source 1..22: mol_type = other RNA
tatttcacttggggctaacttg

SEQ ID NO: 25427 - RNA, 22 nt, synthetic construct
  source 1..22: mol_type = other RNA
tattttttgggatggaatctca

SEQ ID NO: 25428 - RNA, 22 nt, synthetic construct
  source 1..22: mol_type = other RNA
tcaaaatggaggtggcttgttg

SEQ ID NO: 25429 - RNA, 22 nt, synthetic construct
  source 1..22: mol_type = other RNA
tcaaagttcatttctcagttca

SEQ ID NO: 25430 - RNA, 22 nt, synthetic construct
  source 1..22: mol_type = other RNA
tcaacccaaggtatgttcttta

SEQ ID NO: 25431 - RNA, 22 nt, synthetic construct
  source 1..22: mol_type = other RNA
tcaagagtctacatgatttggc

SEQ ID NO: 25432 - RNA, 22 nt, synthetic construct
  source 1..22: mol_type = other RNA
tcaagctatatcaggcaccaag

SEQ ID NO: 25433 - RNA, 22 nt, synthetic construct
  source 1..22: mol_type = other RNA
tcaaggacttctgatgccctct

SEQ ID NO: 25434 - RNA, 22 nt, synthetic construct
  source 1..22: mol_type = other RNA
tcaaggcaggagcaggaaccaa

SEQ ID NO: 25435 - RNA, 22 nt, synthetic construct
  source 1..22: mol_type = other RNA
tcaagtgattcctgggactaca

SEQ ID NO: 25436 - RNA, 22 nt, synthetic construct
  source 1..22: mol_type = other RNA
tcaccactgcacactgcactcc

SEQ ID NO: 25437 - RNA, 22 nt, synthetic construct
  source 1..22: mol_type = other RNA
tcacggtttattcttcaaaatg

SEQ ID NO: 25438 - RNA, 22 nt, synthetic construct
  source 1..22: mol_type = other RNA
tcactcaagagtctacatgatt

SEQ ID NO: 25439 - RNA, 22 nt, synthetic construct
  source 1..22: mol_type = other RNA
tcactggagattgcgctgcatt

SEQ ID NO: 25440 - RNA, 22 nt, synthetic construct
  source 1..22: mol_type = other RNA
tcacttggggctaacttggtgt

SEQ ID NO: 25441 - RNA, 22 nt, synthetic construct
  source 1..22: mol_type = other RNA
tcagaagtccttgagagcctcc

SEQ ID NO: 25442 - RNA, 22 nt, synthetic construct
  source 1..22: mol_type = other RNA
tcagataataacatctgccacg

SEQ ID NO: 25443 - RNA, 22 nt, synthetic construct
  source 1..22: mol_type = other RNA
tcagatgggtgtagatcaaggc

SEQ ID NO: 25444 - RNA, 22 nt, synthetic construct
  source 1..22: mol_type = other RNA
tcagcactcatagcattcctta

SEQ ID NO: 25445 - RNA, 22 nt, synthetic construct
  source 1..22: mol_type = other RNA
tcaggcaccaagtgtttacatt

SEQ ID NO: 25446 - RNA, 22 nt, synthetic construct
  source 1..22: mol_type = other RNA
tcagttcataatagcccccatc

SEQ ID NO: 25447 - RNA, 22 nt, synthetic construct
  source 1..22: mol_type = other RNA
tcataatagcccccatcaaatt

SEQ ID NO: 25448 - RNA, 22 nt, synthetic construct
  source 1..22: mol_type = other RNA
tcataattcctctatacatgcc

SEQ ID NO: 25449 - RNA, 22 nt, synthetic construct
  source 1..22: mol_type = other RNA
tcatacagtttagaaaatcaga

SEQ ID NO: 25450 - RNA, 22 nt, synthetic construct
  source 1..22: mol_type = other RNA
tcatagcattccttaacacatc

SEQ ID NO: 25451 - RNA, 22 nt, synthetic construct
  source 1..22: mol_type = other RNA
tcatcgatttctcccaattcca

SEQ ID NO: 25452 - RNA, 22 nt, synthetic construct
  source 1..22: mol_type = other RNA
tcatgtagactcttgagtgatg

SEQ ID NO: 25453 - RNA, 22 nt, synthetic construct
  source 1..22: mol_type = other RNA
tcatgttattgtactctgtttc

SEQ ID NO: 25454 - RNA, 22 nt, synthetic construct
  source 1..22: mol_type = other RNA
tcatttctcagttcataatagc

SEQ ID NO: 25455 - RNA, 22 nt, synthetic construct
  source 1..22: mol_type = other RNA
tcatttggccagagtggaaatg

SEQ ID NO: 25456 - RNA, 22 nt, synthetic construct
  source 1..22: mol_type = other RNA
tccaccttcccaacaagccacc

SEQ ID NO: 25457 - RNA, 22 nt, synthetic construct
  source 1..22: mol_type = other RNA
tccactctggccaaatgagctt

SEQ ID NO: 25458 - RNA, 22 nt, synthetic construct
  source 1..22: mol_type = other RNA
tccacttaggaacctcagataa

SEQ ID NO: 25459 - RNA, 22 nt, synthetic construct
  source 1..22: mol_type = other RNA
tccagagaaaggctcttaaaaa

SEQ ID NO: 25460 - RNA, 22 nt, synthetic construct
  source 1..22: mol_type = other RNA
tccagcctgggcaatggaatga

SEQ ID NO: 25461 - RNA, 22 nt, synthetic construct
  source 1..22: mol_type = other RNA
tccagtgacagaagatactgct

SEQ ID NO: 25462 - RNA, 22 nt, synthetic construct
  source 1..22: mol_type = other RNA
tccattgcccaggctggagtgc

SEQ ID NO: 25463 - RNA, 22 nt, synthetic construct
  source 1..22: mol_type = other RNA
tccatttccactctggccaaat

SEQ ID NO: 25464 - RNA, 22 nt, synthetic construct
  source 1..22: mol_type = other RNA
tccattttgaagaataaaccgt

SEQ ID NO: 25465 - RNA, 22 nt, synthetic construct
  source 1..22: mol_type = other RNA
tcccaacaagccacctccattt

SEQ ID NO: 25466 - RNA, 22 nt, synthetic construct
  source 1..22: mol_type = other RNA
tcccaacttcaagtgatcagcc

SEQ ID NO: 25467 - RNA, 22 nt, synthetic construct
  source 1..22: mol_type = other RNA
tcccaattccatttccactctg

SEQ ID NO: 25468 - RNA, 22 nt, synthetic construct
  source 1..22: mol_type = other RNA
tcccaggaatcacttgaaccca

SEQ ID NO: 25469 - RNA, 22 nt, synthetic construct
  source 1..22: mol_type = other RNA
tcccaggcactctactagacac

SEQ ID NO: 25470 - RNA, 22 nt, synthetic construct
  source 1..22: mol_type = other RNA
tccctcataattcctctataca

SEQ ID NO: 25471 - RNA, 22 nt, synthetic construct
  source 1..22: mol_type = other RNA
tccgcctcctgggttcaagtga

SEQ ID NO: 25472 - RNA, 22 nt, synthetic construct
  source 1..22: mol_type = other RNA
tcctaagtggatcaacccaagg

SEQ ID NO: 25473 - RNA, 22 nt, synthetic construct
  source 1..22: mol_type = other RNA
tcctctatacatgccttttttg

SEQ ID NO: 25474 - RNA, 22 nt, synthetic construct
  source 1..22: mol_type = other RNA
tcctgccttgatctacacccat

SEQ ID NO: 25475 - RNA, 22 nt, synthetic construct
  source 1..22: mol_type = other RNA
tcctgctcctgccttgatctac

SEQ ID NO: 25476 - RNA, 22 nt, synthetic construct
  source 1..22: mol_type = other RNA
tcctgggttcaagtgattcctg

SEQ ID NO: 25477 - RNA, 22 nt, synthetic construct
  source 1..22: mol_type = other RNA
tccttaacacatcactcaagag

SEQ ID NO: 25478 - RNA, 22 nt, synthetic construct
  source 1..22: mol_type = other RNA
tccttgagagcctccagagaaa

SEQ ID NO: 25479 - RNA, 22 nt, synthetic construct
  source 1..22: mol_type = other RNA
tcgatgaccaaatgtaaacact

SEQ ID NO: 25480 - RNA, 22 nt, synthetic construct
  source 1..22: mol_type = other RNA
tcgatttctcccaattccattt

SEQ ID NO: 25481 - RNA, 22 nt, synthetic construct
  source 1..22: mol_type = other RNA
tcgggaaaagacacattaatat

SEQ ID NO: 25482 - RNA, 22 nt, synthetic construct
  source 1..22: mol_type = other RNA
tctaaactgtatgaagtgtcta

SEQ ID NO: 25483 - RNA, 22 nt, synthetic construct
  source 1..22: mol_type = other RNA
tctacacccatctgattttcta

SEQ ID NO: 25484 - RNA, 22 nt, synthetic construct
  source 1..22: mol_type = other RNA
tctacatgatttggccccaaga

SEQ ID NO: 25485 - RNA, 22 nt, synthetic construct
  source 1..22: mol_type = other RNA
tctactagacacttcatacagt

SEQ ID NO: 25486 - RNA, 22 nt, synthetic construct
  source 1..22: mol_type = other RNA
tctagcagatttctagcagtat

SEQ ID NO: 25487 - RNA, 22 nt, synthetic construct
  source 1..22: mol_type = other RNA
tctagcagtatcttctgtcact

SEQ ID NO: 25488 - RNA, 22 nt, synthetic construct
  source 1..22: mol_type = other RNA
tctagtagagtgcctgggacat

SEQ ID NO: 25489 - RNA, 22 nt, synthetic construct
  source 1..22: mol_type = other RNA
tctatacatgccttttttgttt

SEQ ID NO: 25490 - RNA, 22 nt, synthetic construct
  source 1..22: mol_type = other RNA
tctatacgtggcagatgttatt

SEQ ID NO: 25491 - RNA, 22 nt, synthetic construct
  source 1..22: mol_type = other RNA
tctcaaggacttctgatgccct

SEQ ID NO: 25492 - RNA, 22 nt, synthetic construct
  source 1..22: mol_type = other RNA
tctcaccactgcacactgcact

SEQ ID NO: 25493 - RNA, 22 nt, synthetic construct
  source 1..22: mol_type = other RNA
tctcagcactcatagcattcct

SEQ ID NO: 25494 - RNA, 22 nt, synthetic construct
  source 1..22: mol_type = other RNA
tctcagttcataatagccccca

SEQ ID NO: 25495 - RNA, 22 nt, synthetic construct
  source 1..22: mol_type = other RNA
tctccagtgacagaagatactg

SEQ ID NO: 25496 - RNA, 22 nt, synthetic construct
  source 1..22: mol_type = other RNA
tctcccaattccatttccactc

SEQ ID NO: 25497 - RNA, 22 nt, synthetic construct
  source 1..22: mol_type = other RNA
tctctggaggctctcaaggact

SEQ ID NO: 25498 - RNA, 22 nt, synthetic construct
  source 1..22: mol_type = other RNA
tctgaggttcctaagtggatca

SEQ ID NO: 25499 - RNA, 22 nt, synthetic construct
  source 1..22: mol_type = other RNA
tctgatgccctctcagcactca

SEQ ID NO: 25500 - RNA, 22 nt, synthetic construct
  source 1..22: mol_type = other RNA
tctgattttctaaactgtatga

SEQ ID NO: 25501 - RNA, 22 nt, synthetic construct
  source 1..22: mol_type = other RNA
tctgccacgtatagagcaattg

SEQ ID NO: 25502 - RNA, 22 nt, synthetic construct
  source 1..22: mol_type = other RNA
tctggaggctctcaaggacttc

SEQ ID NO: 25503 - RNA, 22 nt, synthetic construct
  source 1..22: mol_type = other RNA
tctggccaaatgagcttccacc

SEQ ID NO: 25504 - RNA, 22 nt, synthetic construct
  source 1..22: mol_type = other RNA
tctgtcactggagattgcgctg

SEQ ID NO: 25505 - RNA, 22 nt, synthetic construct
  source 1..22: mol_type = other RNA
tctgtttccaccccttccattt

SEQ ID NO: 25506 - RNA, 22 nt, synthetic construct
  source 1..22: mol_type = other RNA
tcttaaaaatgcagcgcaatct

SEQ ID NO: 25507 - RNA, 22 nt, synthetic construct
  source 1..22: mol_type = other RNA
tcttatgtttatgcctttcttt

SEQ ID NO: 25508 - RNA, 22 nt, synthetic construct
  source 1..22: mol_type = other RNA
tcttcaaaatggaggtggcttg

SEQ ID NO: 25509 - RNA, 22 nt, synthetic construct
  source 1..22: mol_type = other RNA
tcttctgtcactggagattgcg

SEQ ID NO: 25510 - RNA, 22 nt, synthetic construct
  source 1..22: mol_type = other RNA
tcttgaactcccaacttcaagt

SEQ ID NO: 25511 - RNA, 22 nt, synthetic construct
  source 1..22: mol_type = other RNA
tcttgagtgatgtgttaaggaa

SEQ ID NO: 25512 - RNA, 22 nt, synthetic construct
  source 1..22: mol_type = other RNA
tcttggggccaaatcatgtaga

SEQ ID NO: 25513 - RNA, 22 nt, synthetic construct
  source 1..22: mol_type = other RNA
tctttccctcataattcctcta

SEQ ID NO: 25514 - RNA, 22 nt, synthetic construct
  source 1..22: mol_type = other RNA
tctttttggttcctgctcctgc

SEQ ID NO: 25515 - RNA, 22 nt, synthetic construct
  source 1..22: mol_type = other RNA
tgaaaagtatcttggggccaaa

SEQ ID NO: 25516 - RNA, 22 nt, synthetic construct
  source 1..22: mol_type = other RNA
tgaaataccctggcaatattaa

SEQ ID NO: 25517 - RNA, 22 nt, synthetic construct
  source 1..22: mol_type = other RNA
tgaactcccaacttcaagtgat

SEQ ID NO: 25518 - RNA, 22 nt, synthetic construct
  source 1..22: mol_type = other RNA
tgaactgagaaatgaactttga

SEQ ID NO: 25519 - RNA, 22 nt, synthetic construct
  source 1..22: mol_type = other RNA
tgaactttgaaaagtatcttgg

SEQ ID NO: 25520 - RNA, 22 nt, synthetic construct
  source 1..22: mol_type = other RNA
tgaagaataaaccgtgacttgg

SEQ ID NO: 25521 - RNA, 22 nt, synthetic construct
  source 1..22: mol_type = other RNA
tgaagtgtctagtagagtgcct

SEQ ID NO: 25522 - RNA, 22 nt, synthetic construct
  source 1..22: mol_type = other RNA
tgacaccaagttagccccaagt

SEQ ID NO: 25523 - RNA, 22 nt, synthetic construct
  source 1..22: mol_type = other RNA
tgacagaagatactgctagaaa

SEQ ID NO: 25524 - RNA, 22 nt, synthetic construct
  source 1..22: mol_type = other RNA
tgaccaaatgtaaacacttggt

SEQ ID NO: 25525 - RNA, 22 nt, synthetic construct
  source 1..22: mol_type = other RNA
tgacttggtatctttccctcat

SEQ ID NO: 25526 - RNA, 22 nt, synthetic construct
  source 1..22: mol_type = other RNA
tgagaaatgaactttgaaaagt

SEQ ID NO: 25527 - RNA, 22 nt, synthetic construct
  source 1..22: mol_type = other RNA
tgagagcctccagagaaaggct

SEQ ID NO: 25528 - RNA, 22 nt, synthetic construct
  source 1..22: mol_type = other RNA
tgagagggcatcagaagtcctt

SEQ ID NO: 25529 - RNA, 22 nt, synthetic construct
  source 1..22: mol_type = other RNA
tgagatctcaccactgcacact

SEQ ID NO: 25530 - RNA, 22 nt, synthetic construct
  source 1..22: mol_type = other RNA
tgagattccatcccaaaaaata

SEQ ID NO: 25531 - RNA, 22 nt, synthetic construct
  source 1..22: mol_type = other RNA
tgagctgagatctcaccactgc

SEQ ID NO: 25532 - RNA, 22 nt, synthetic construct
  source 1..22: mol_type = other RNA
tgagcttccaccttcccaacaa

SEQ ID NO: 25533 - RNA, 22 nt, synthetic construct
  source 1..22: mol_type = other RNA
tgaggaatatcgggaaaagaca

SEQ ID NO: 25534 - RNA, 22 nt, synthetic construct
  source 1..22: mol_type = other RNA
tgagggaaagataccaagtcac

SEQ ID NO: 25535 - RNA, 22 nt, synthetic construct
  source 1..22: mol_type = other RNA
tgaggttcctaagtggatcaac

SEQ ID NO: 25536 - RNA, 22 nt, synthetic construct
  source 1..22: mol_type = other RNA
tgagtaatttgatgggggctat

SEQ ID NO: 25537 - RNA, 22 nt, synthetic construct
  source 1..22: mol_type = other RNA
tgagtgatgtgttaaggaatgc

SEQ ID NO: 25538 - RNA, 22 nt, synthetic construct
  source 1..22: mol_type = other RNA
tgagtgctgagagggcatcaga

SEQ ID NO: 25539 - RNA, 22 nt, synthetic construct
  source 1..22: mol_type = other RNA
tgatatagcttgacaccaagtt

SEQ ID NO: 25540 - RNA, 22 nt, synthetic construct
  source 1..22: mol_type = other RNA
tgatcacttgaagttgggagtt

SEQ ID NO: 25541 - RNA, 22 nt, synthetic construct
  source 1..22: mol_type = other RNA
tgatccacttaggaacctcaga

SEQ ID NO: 25542 - RNA, 22 nt, synthetic construct
  source 1..22: mol_type = other RNA
tgatctacacccatctgatttt

SEQ ID NO: 25543 - RNA, 22 nt, synthetic construct
  source 1..22: mol_type = other RNA
tgatgccctctcagcactcata

SEQ ID NO: 25544 - RNA, 22 nt, synthetic construct
  source 1..22: mol_type = other RNA
tgatgggggctattatgaactg

SEQ ID NO: 25545 - RNA, 22 nt, synthetic construct
  source 1..22: mol_type = other RNA
tgatgtgttaaggaatgctatg

SEQ ID NO: 25546 - RNA, 22 nt, synthetic construct
  source 1..22: mol_type = other RNA
tgattcctgggactacaggcac

SEQ ID NO: 25547 - RNA, 22 nt, synthetic construct
  source 1..22: mol_type = other RNA
tgatttggccccaagatacttt

SEQ ID NO: 25548 - RNA, 22 nt, synthetic construct
  source 1..22: mol_type = other RNA
tgattttctaaactgtatgaag

SEQ ID NO: 25549 - RNA, 22 nt, synthetic construct
  source 1..22: mol_type = other RNA
tgcacactgcactccagcctgg

SEQ ID NO: 25550 - RNA, 22 nt, synthetic construct
  source 1..22: mol_type = other RNA
tgcagcgcaatctccagtgaca

SEQ ID NO: 25551 - RNA, 22 nt, synthetic construct
  source 1..22: mol_type = other RNA
tgcagtgagctgagatctcacc

SEQ ID NO: 25552 - RNA, 22 nt, synthetic construct
  source 1..22: mol_type = other RNA
tgcagtgtgcagtggtgagatc

SEQ ID NO: 25553 - RNA, 22 nt, synthetic construct
  source 1..22: mol_type = other RNA
tgcatttttaagagcctttctc

SEQ ID NO: 25554 - RNA, 22 nt, synthetic construct
  source 1..22: mol_type = other RNA
tgccacgtatagagcaattgct

SEQ ID NO: 25555 - RNA, 22 nt, synthetic construct
  source 1..22: mol_type = other RNA
tgccagggtatttcacttgggg

SEQ ID NO: 25556 - RNA, 22 nt, synthetic construct
  source 1..22: mol_type = other RNA
tgccctctcagcactcatagca

SEQ ID NO: 25557 - RNA, 22 nt, synthetic construct
  source 1..22: mol_type = other RNA
tgcctgatatagcttgacacca

SEQ ID NO: 25558 - RNA, 22 nt, synthetic construct
  source 1..22: mol_type = other RNA
tgcctgggacatagcaattgct

SEQ ID NO: 25559 - RNA, 22 nt, synthetic construct
  source 1..22: mol_type = other RNA
tgcctgtagtcccaggaatcac

SEQ ID NO: 25560 - RNA, 22 nt, synthetic construct
  source 1..22: mol_type = other RNA
tgccttgatctacacccatctg

SEQ ID NO: 25561 - RNA, 22 nt, synthetic construct
  source 1..22: mol_type = other RNA
tgcctttctttttggttcctgc

SEQ ID NO: 25562 - RNA, 22 nt, synthetic construct
  source 1..22: mol_type = other RNA
tgcgctgcatttttaagagcct

SEQ ID NO: 25563 - RNA, 22 nt, synthetic construct
  source 1..22: mol_type = other RNA
tgctagaaatctgctagaaaaa

SEQ ID NO: 25564 - RNA, 22 nt, synthetic construct
  source 1..22: mol_type = other RNA
tgctatgagtgctgagagggca

SEQ ID NO: 25565 - RNA, 22 nt, synthetic construct
  source 1..22: mol_type = other RNA
tgctatgtcccaggcactctac

SEQ ID NO: 25566 - RNA, 22 nt, synthetic construct
  source 1..22: mol_type = other RNA
tgctcctgccttgatctacacc

SEQ ID NO: 25567 - RNA, 22 nt, synthetic construct
  source 1..22: mol_type = other RNA
tgctctatacgtggcagatgtt

SEQ ID NO: 25568 - RNA, 22 nt, synthetic construct
  source 1..22: mol_type = other RNA
tgctgagagggcatcagaagtc

SEQ ID NO: 25569 - RNA, 22 nt, synthetic construct
  source 1..22: mol_type = other RNA
tggaaacagagtacaataacat

SEQ ID NO: 25570 - RNA, 22 nt, synthetic construct
  source 1..22: mol_type = other RNA
tggaaatggaattgggagaaat

SEQ ID NO: 25571 - RNA, 22 nt, synthetic construct
  source 1..22: mol_type = other RNA
tggaagctcatttggccagagt

SEQ ID NO: 25572 - RNA, 22 nt, synthetic construct
  source 1..22: mol_type = other RNA
tggaaggggtggaaacagagta

SEQ ID NO: 25573 - RNA, 22 nt, synthetic construct
  source 1..22: mol_type = other RNA
tggaatctcattccattgccca

SEQ ID NO: 25574 - RNA, 22 nt, synthetic construct
  source 1..22: mol_type = other RNA
tggaatgagattccatcccaaa

SEQ ID NO: 25575 - RNA, 22 nt, synthetic construct
  source 1..22: mol_type = other RNA
tggaattgggagaaatcgatga

SEQ ID NO: 25576 - RNA, 22 nt, synthetic construct
  source 1..22: mol_type = other RNA
tggagattgcgctgcattttta

SEQ ID NO: 25577 - RNA, 22 nt, synthetic construct
  source 1..22: mol_type = other RNA
tggaggctctcaaggacttctg

SEQ ID NO: 25578 - RNA, 22 nt, synthetic construct
  source 1..22: mol_type = other RNA
tggaggtggcttgttgggaagg

SEQ ID NO: 25579 - RNA, 22 nt, synthetic construct
  source 1..22: mol_type = other RNA
tggagtgcagtgtgcagtggtg

SEQ ID NO: 25580 - RNA, 22 nt, synthetic construct
  source 1..22: mol_type = other RNA
tggatcaacccaaggtatgttc

SEQ ID NO: 25581 - RNA, 22 nt, synthetic construct
  source 1..22: mol_type = other RNA
tggcaatattaatgtgtctttt

SEQ ID NO: 25582 - RNA, 22 nt, synthetic construct
  source 1..22: mol_type = other RNA
tggcagatgttattatctgagg

SEQ ID NO: 25583 - RNA, 22 nt, synthetic construct
  source 1..22: mol_type = other RNA
tggccaaatgagcttccacctt

SEQ ID NO: 25584 - RNA, 22 nt, synthetic construct
  source 1..22: mol_type = other RNA
tggccagagtggaaatggaatt

SEQ ID NO: 25585 - RNA, 22 nt, synthetic construct
  source 1..22: mol_type = other RNA
tggccccaagatacttttcaaa

SEQ ID NO: 25586 - RNA, 22 nt, synthetic construct
  source 1..22: mol_type = other RNA
tggcttgttgggaaggtggaag

SEQ ID NO: 25587 - RNA, 22 nt, synthetic construct
  source 1..22: mol_type = other RNA
tgggaaggtggaagctcatttg

SEQ ID NO: 25588 - RNA, 22 nt, synthetic construct
  source 1..22: mol_type = other RNA
tgggacatagcaattgctctat

SEQ ID NO: 25589 - RNA, 22 nt, synthetic construct
  source 1..22: mol_type = other RNA
tgggagaaatcgatgaccaaat

SEQ ID NO: 25590 - RNA, 22 nt, synthetic construct
  source 1..22: mol_type = other RNA
tgggatggaatctcattccatt

SEQ ID NO: 25591 - RNA, 22 nt, synthetic construct
  source 1..22: mol_type = other RNA
tgggcaatggaatgagattcca

SEQ ID NO: 25592 - RNA, 22 nt, synthetic construct
  source 1..22: mol_type = other RNA
tggggccaaatcatgtagactc

SEQ ID NO: 25593 - RNA, 22 nt, synthetic construct
  source 1..22: mol_type = other RNA
tggggctaacttggtgtcaagc

SEQ ID NO: 25594 - RNA, 22 nt, synthetic construct
  source 1..22: mol_type = other RNA
tgggggctattatgaactgaga

SEQ ID NO: 25595 - RNA, 22 nt, synthetic construct
  source 1..22: mol_type = other RNA
tgggtgtagatcaaggcaggag

SEQ ID NO: 25596 - RNA, 22 nt, synthetic construct
  source 1..22: mol_type = other RNA
tgggttcaagtgattcctggga

SEQ ID NO: 25597 - RNA, 22 nt, synthetic construct
  source 1..22: mol_type = other RNA
tgggttgatccacttaggaacc

SEQ ID NO: 25598 - RNA, 22 nt, synthetic construct
  source 1..22: mol_type = other RNA
tggtatctttccctcataattc

SEQ ID NO: 25599 - RNA, 22 nt, synthetic construct
  source 1..22: mol_type = other RNA
tggtcatcgatttctcccaatt

SEQ ID NO: 25600 - RNA, 22 nt, synthetic construct
  source 1..22: mol_type = other RNA
tggtcttgaactcccaacttca

SEQ ID NO: 25601 - RNA, 22 nt, synthetic construct
  source 1..22: mol_type = other RNA
tggtgcctgatatagcttgaca

SEQ ID NO: 25602 - RNA, 22 nt, synthetic construct
  source 1..22: mol_type = other RNA
tggtggtgtgtgcctgtagtcc

SEQ ID NO: 25603 - RNA, 22 nt, synthetic construct
  source 1..22: mol_type = other RNA
tggtgtcaagctatatcaggca

SEQ ID NO: 25604 - RNA, 22 nt, synthetic construct
  source 1..22: mol_type = other RNA
tggtgtgtgcctgtagtcccag

SEQ ID NO: 25605 - RNA, 22 nt, synthetic construct
  source 1..22: mol_type = other RNA
tggttcctgctcctgccttgat

SEQ ID NO: 25606 - RNA, 22 nt, synthetic construct
  source 1..22: mol_type = other RNA
tgtaaacacttggtgcctgata

SEQ ID NO: 25607 - RNA, 22 nt, synthetic construct
  source 1..22: mol_type = other RNA
tgtactctgtttccaccccttc

SEQ ID NO: 25608 - RNA, 22 nt, synthetic construct
  source 1..22: mol_type = other RNA
tgtagactcttgagtgatgtgt

SEQ ID NO: 25609 - RNA, 22 nt, synthetic construct
  source 1..22: mol_type = other RNA
tgtagatcaaggcaggagcagg

SEQ ID NO: 25610 - RNA, 22 nt, synthetic construct
  source 1..22: mol_type = other RNA
tgtagtcccaggaatcacttga

SEQ ID NO: 25611 - RNA, 22 nt, synthetic construct
  source 1..22: mol_type = other RNA
tgtatagaggaattatgaggga

SEQ ID NO: 25612 - RNA, 22 nt, synthetic construct
  source 1..22: mol_type = other RNA
tgtatgaagtgtctagtagagt

SEQ ID NO: 25613 - RNA, 22 nt, synthetic construct
  source 1..22: mol_type = other RNA
tgtcaagctatatcaggcacca

SEQ ID NO: 25614 - RNA, 22 nt, synthetic construct
  source 1..22: mol_type = other RNA
tgtcactggagattgcgctgca

SEQ ID NO: 25615 - RNA, 22 nt, synthetic construct
  source 1..22: mol_type = other RNA
tgtcccaggcactctactagac

SEQ ID NO: 25616 - RNA, 22 nt, synthetic construct
  source 1..22: mol_type = other RNA
tgtctagtagagtgcctgggac

SEQ ID NO: 25617 - RNA, 22 nt, synthetic construct
  source 1..22: mol_type = other RNA
tgtgcagtggtgagatctcagc

SEQ ID NO: 25618 - RNA, 22 nt, synthetic construct
  source 1..22: mol_type = other RNA
tgtgcctgtagtcccaggaatc

SEQ ID NO: 25619 - RNA, 22 nt, synthetic construct
  source 1..22: mol_type = other RNA
tgtgtgcctgtagtcccaggaa

SEQ ID NO: 25620 - RNA, 22 nt, synthetic construct
  source 1..22: mol_type = other RNA
tgtgttaaggaatgctatgagt

SEQ ID NO: 25621 - RNA, 22 nt, synthetic construct
  source 1..22: mol_type = other RNA
tgttaaggaatgctatgagtgc

SEQ ID NO: 25622 - RNA, 22 nt, synthetic construct
  source 1..22: mol_type = other RNA
tgttattatctgaggttcctaa

SEQ ID NO: 25623 - RNA, 22 nt, synthetic construct
  source 1..22: mol_type = other RNA
tgttattgtactctgtttccac

SEQ ID NO: 25624 - RNA, 22 nt, synthetic construct
  source 1..22: mol_type = other RNA
tgttgggaaggtggaagctcat

SEQ ID NO: 25625 - RNA, 22 nt, synthetic construct
  source 1..22: mol_type = other RNA
tgtttacatttggtcatcgatt

SEQ ID NO: 25626 - RNA, 22 nt, synthetic construct
  source 1..22: mol_type = other RNA
tgtttatgcctttctttttggt

SEQ ID NO: 25627 - RNA, 22 nt, synthetic construct
  source 1..22: mol_type = other RNA
tgtttccaccccttccattttt

SEQ ID NO: 25628 - RNA, 22 nt, synthetic construct
  source 1..22: mol_type = other RNA
ttaaaaatgcagcgcaatctcc

SEQ ID NO: 25629 - RNA, 22 nt, synthetic construct
  source 1..22: mol_type = other RNA
ttaacacatcactcaagagtct

SEQ ID NO: 25630 - RNA, 22 nt, synthetic construct
  source 1..22: mol_type = other RNA
ttaagagcctttctctggaggc

SEQ ID NO: 25631 - RNA, 22 nt, synthetic construct
  source 1..22: mol_type = other RNA
ttaaggaatgctatgagtgctg

SEQ ID NO: 25632 - RNA, 22 nt, synthetic construct
  source 1..22: mol_type = other RNA
ttaatattgccagggtatttca

SEQ ID NO: 25633 - RNA, 22 nt, synthetic construct
  source 1..22: mol_type = other RNA
ttacatttggtcatcgatttct

SEQ ID NO: 25634 - RNA, 22 nt, synthetic construct
  source 1..22: mol_type = other RNA
ttactcatgttattgtactctg

SEQ ID NO: 25635 - RNA, 22 nt, synthetic construct
  source 1..22: mol_type = other RNA
ttagaaaatcagatgggtgtag

SEQ ID NO: 25636 - RNA, 22 nt, synthetic construct
  source 1..22: mol_type = other RNA
ttagccccaagtgaaataccct

SEQ ID NO: 25637 - RNA, 22 nt, synthetic construct
  source 1..22: mol_type = other RNA
ttaggaacctcagataataaca

SEQ ID NO: 25638 - RNA, 22 nt, synthetic construct
  source 1..22: mol_type = other RNA
ttatctgaggttcctaagtgga

SEQ ID NO: 25639 - RNA, 22 nt, synthetic construct
  source 1..22: mol_type = other RNA
ttatgaactgagaaatgaactt

SEQ ID NO: 25640 - RNA, 22 nt, synthetic construct
  source 1..22: mol_type = other RNA
ttatgagggaaagataccaagt

SEQ ID NO: 25641 - RNA, 22 nt, synthetic construct
  source 1..22: mol_type = other RNA
ttatgcctttctttttggttcc

SEQ ID NO: 25642 - RNA, 22 nt, synthetic construct
  source 1..22: mol_type = other RNA
ttattatctgaggttcctaagt

SEQ ID NO: 25643 - RNA, 22 nt, synthetic construct
  source 1..22: mol_type = other RNA
ttattcttcaaaatggaggtgg

SEQ ID NO: 25644 - RNA, 22 nt, synthetic construct
  source 1..22: mol_type = other RNA
ttattgtactctgtttccaccc

SEQ ID NO: 25645 - RNA, 22 nt, synthetic construct
  source 1..22: mol_type = other RNA
ttattttttgggatggaatctc

SEQ ID NO: 25646 - RNA, 22 nt, synthetic construct
  source 1..22: mol_type = other RNA
ttcaaaatggaggtggcttgtt

SEQ ID NO: 25647 - RNA, 22 nt, synthetic construct
  source 1..22: mol_type = other RNA
ttcaaagttcatttctcagttc

SEQ ID NO: 25648 - RNA, 22 nt, synthetic construct
  source 1..22: mol_type = other RNA
ttcaagtgattcctgggactac

SEQ ID NO: 25649 - RNA, 22 nt, synthetic construct
  source 1..22: mol_type = other RNA
ttcacttggggctaacttggtg

SEQ ID NO: 25650 - RNA, 22 nt, synthetic construct
  source 1..22: mol_type = other RNA
ttcataatagcccccatcaaat

SEQ ID NO: 25651 - RNA, 22 nt, synthetic construct
  source 1..22: mol_type = other RNA
ttcatacagtttagaaaatcag

SEQ ID NO: 25652 - RNA, 22 nt, synthetic construct
  source 1..22: mol_type = other RNA
ttcatttctcagttcataatag

SEQ ID NO: 25653 - RNA, 22 nt, synthetic construct
  source 1..22: mol_type = other RNA
ttccaccttcccaacaagccac

SEQ ID NO: 25654 - RNA, 22 nt, synthetic construct
  source 1..22: mol_type = other RNA
ttccactctggccaaatgagct

SEQ ID NO: 25655 - RNA, 22 nt, synthetic construct
  source 1..22: mol_type = other RNA
ttccattgcccaggctggagtg

SEQ ID NO: 25656 - RNA, 22 nt, synthetic construct
  source 1..22: mol_type = other RNA
ttccatttccactctggccaaa

SEQ ID NO: 25657 - RNA, 22 nt, synthetic construct
  source 1..22: mol_type = other RNA
ttcccaacaagccacctccatt

SEQ ID NO: 25658 - RNA, 22 nt, synthetic construct
  source 1..22: mol_type = other RNA
ttccctcataattcctctatac

SEQ ID NO: 25659 - RNA, 22 nt, synthetic construct
  source 1..22: mol_type = other RNA
ttcctaagtggatcaacccaag

SEQ ID NO: 25660 - RNA, 22 nt, synthetic construct
  source 1..22: mol_type = other RNA
ttcctctatacatgcctttttt

SEQ ID NO: 25661 - RNA, 22 nt, synthetic construct
  source 1..22: mol_type = other RNA
ttcctgctcctgccttgatcta

SEQ ID NO: 25662 - RNA, 22 nt, synthetic construct
  source 1..22: mol_type = other RNA
ttcctgggactacaggcacaca

SEQ ID NO: 25663 - RNA, 22 nt, synthetic construct
  source 1..22: mol_type = other RNA
ttccttaacacatcactcaaga

SEQ ID NO: 25664 - RNA, 22 nt, synthetic construct
  source 1..22: mol_type = other RNA
ttctaaactgtatgaagtgtct

SEQ ID NO: 25665 - RNA, 22 nt, synthetic construct
  source 1..22: mol_type = other RNA
ttctagcagatttctagcagta

SEQ ID NO: 25666 - RNA, 22 nt, synthetic construct
  source 1..22: mol_type = other RNA
ttctagcagtatcttctgtcac

SEQ ID NO: 25667 - RNA, 22 nt, synthetic construct
  source 1..22: mol_type = other RNA
ttctcagttcataatagccccc

SEQ ID NO: 25668 - RNA, 22 nt, synthetic construct
  source 1..22: mol_type = other RNA
ttctcccaattccatttccact

SEQ ID NO: 25669 - RNA, 22 nt, synthetic construct
  source 1..22: mol_type = other RNA
ttctctggaggctctcaaggac

SEQ ID NO: 25670 - RNA, 22 nt, synthetic construct
  source 1..22: mol_type = other RNA
ttctgatgccctctcagcactc

SEQ ID NO: 25671 - RNA, 22 nt, synthetic construct
  source 1..22: mol_type = other RNA
ttctgtcactggagattgcgct

SEQ ID NO: 25672 - RNA, 22 nt, synthetic construct
  source 1..22: mol_type = other RNA
ttcttatgtttatgcctttctt

SEQ ID NO: 25673 - RNA, 22 nt, synthetic construct
  source 1..22: mol_type = other RNA
ttcttcaaaatggaggtggctt

SEQ ID NO: 25674 - RNA, 22 nt, synthetic construct
  source 1..22: mol_type = other RNA
ttctttttggttcctgctcctg

SEQ ID NO: 25675 - RNA, 22 nt, synthetic construct
  source 1..22: mol_type = other RNA
ttgaaaagtatcttggggccaa

SEQ ID NO: 25676 - RNA, 22 nt, synthetic construct
  source 1..22: mol_type = other RNA
ttgaactcccaacttcaagtga

SEQ ID NO: 25677 - RNA, 22 nt, synthetic construct
  source 1..22: mol_type = other RNA
ttgaagaataaaccgtgacttg

SEQ ID NO: 25678 - RNA, 22 nt, synthetic construct
  source 1..22: mol_type = other RNA
ttgacaccaagttagccccaag

SEQ ID NO: 25679 - RNA, 22 nt, synthetic construct
  source 1..22: mol_type = other RNA
ttgagagcctccagagaaaggc

SEQ ID NO: 25680 - RNA, 22 nt, synthetic construct
  source 1..22: mol_type = other RNA
ttgagtgatgtgttaaggaatg

SEQ ID NO: 25681 - RNA, 22 nt, synthetic construct
  source 1..22: mol_type = other RNA
ttgatccacttaggaacctcag

SEQ ID NO: 25682 - RNA, 22 nt, synthetic construct
  source 1..22: mol_type = other RNA
ttgatctacacccatctgattt

SEQ ID NO: 25683 - RNA, 22 nt, synthetic construct
  source 1..22: mol_type = other RNA
ttgatgggggctattatgaact

SEQ ID NO: 25684 - RNA, 22 nt, synthetic construct
  source 1..22: mol_type = other RNA
ttgccagggtatttcacttggg

SEQ ID NO: 25685 - RNA, 22 nt, synthetic construct
  source 1..22: mol_type = other RNA
ttgcgctgcatttttaagagcc

SEQ ID NO: 25686 - RNA, 22 nt, synthetic construct
  source 1..22: mol_type = other RNA
ttgctatgtcccaggcactcta

SEQ ID NO: 25687 - RNA, 22 nt, synthetic construct
  source 1..22: mol_type = other RNA
ttgctctatacgtggcagatgt

SEQ ID NO: 25688 - RNA, 22 nt, synthetic construct
  source 1..22: mol_type = other RNA
ttggccagagtggaaatggaat

SEQ ID NO: 25689 - RNA, 22 nt, synthetic construct
  source 1..22: mol_type = other RNA
ttggccccaagatacttttcaa

SEQ ID NO: 25690 - RNA, 22 nt, synthetic construct
  source 1..22: mol_type = other RNA
ttgggaaggtggaagctcattt

SEQ ID NO: 25691 - RNA, 22 nt, synthetic construct
  source 1..22: mol_type = other RNA
ttgggagaaatcgatgaccaaa

SEQ ID NO: 25692 - RNA, 22 nt, synthetic construct
  source 1..22: mol_type = other RNA
ttgggatggaatctcattccat

SEQ ID NO: 25693 - RNA, 22 nt, synthetic construct
  source 1..22: mol_type = other RNA
ttggggccaaatcatgtagact

SEQ ID NO: 25694 - RNA, 22 nt, synthetic construct
  source 1..22: mol_type = other RNA
ttggggctaacttggtgtcaag

SEQ ID NO: 25695 - RNA, 22 nt, synthetic construct
  source 1..22: mol_type = other RNA
ttgggttgatccacttaggaac

SEQ ID NO: 25696 - RNA, 22 nt, synthetic construct
  source 1..22: mol_type = other RNA
ttggtatctttccctcataatt

SEQ ID NO: 25697 - RNA, 22 nt, synthetic construct
  source 1..22: mol_type = other RNA
ttggtcatcgatttctcccaat

SEQ ID NO: 25698 - RNA, 22 nt, synthetic construct
  source 1..22: mol_type = other RNA
ttggtgcctgatatagcttgac

SEQ ID NO: 25699 - RNA, 22 nt, synthetic construct
  source 1..22: mol_type = other RNA
ttggtgtcaagctatatcaggc

SEQ ID NO: 25700 - RNA, 22 nt, synthetic construct
  source 1..22: mol_type = other RNA
ttggttcctgctcctgccttga

SEQ ID NO: 25701 - RNA, 22 nt, synthetic construct
  source 1..22: mol_type = other RNA
ttgtactctgtttccacccctt

SEQ ID NO: 25702 - RNA, 22 nt, synthetic construct
  source 1..22: mol_type = other RNA
ttgttgggaaggtggaagctca

SEQ ID NO: 25703 - RNA, 22 nt, synthetic construct
  source 1..22: mol_type = other RNA
tttaagagcctttctctggagg

SEQ ID NO: 25704 - RNA, 22 nt, synthetic construct
  source 1..22: mol_type = other RNA
tttacatttggtcatcgatttc

SEQ ID NO: 25705 - RNA, 22 nt, synthetic construct
  source 1..22: mol_type = other RNA
tttagaaaatcagatgggtgta

SEQ ID NO: 25706 - RNA, 22 nt, synthetic construct
  source 1..22: mol_type = other RNA
tttatgcctttctttttggttc

SEQ ID NO: 25707 - RNA, 22 nt, synthetic construct
  source 1..22: mol_type = other RNA
tttattcttcaaaatggaggtg

SEQ ID NO: 25708 - RNA, 22 nt, synthetic construct
  source 1..22: mol_type = other RNA
tttattttttgggatggaatct

SEQ ID NO: 25709 - RNA, 22 nt, synthetic construct
  source 1..22: mol_type = other RNA
tttcaaagttcatttctcagtt

SEQ ID NO: 25710 - RNA, 22 nt, synthetic construct
  source 1..22: mol_type = other RNA
tttcacttggggctaacttggt

SEQ ID NO: 25711 - RNA, 22 nt, synthetic construct
  source 1..22: mol_type = other RNA
tttccactctggccaaatgagc

SEQ ID NO: 25712 - RNA, 22 nt, synthetic construct
  source 1..22: mol_type = other RNA
tttccctcataattcctctata

SEQ ID NO: 25713 - RNA, 22 nt, synthetic construct
  source 1..22: mol_type = other RNA
tttctaaactgtatgaagtgtc

SEQ ID NO: 25714 - RNA, 22 nt, synthetic construct
  source 1..22: mol_type = other RNA
tttctagcagatttctagcagt

SEQ ID NO: 25715 - RNA, 22 nt, synthetic construct
  source 1..22: mol_type = other RNA
tttctagcagtatcttctgtca

SEQ ID NO: 25716 - RNA, 22 nt, synthetic construct
  source 1..22: mol_type = other RNA
tttctcagttcataatagcccc

SEQ ID NO: 25717 - RNA, 22 nt, synthetic construct
  source 1..22: mol_type = other RNA
tttctcccaattccatttccac

SEQ ID NO: 25718 - RNA, 22 nt, synthetic construct
  source 1..22: mol_type = other RNA
tttctctggaggctctcaagga

SEQ ID NO: 25719 - RNA, 22 nt, synthetic construct
  source 1..22: mol_type = other RNA
tttcttatgtttatgcctttct

SEQ ID NO: 25720 - RNA, 22 nt, synthetic construct
  source 1..22: mol_type = other RNA
tttctttttggttcctgctcct

SEQ ID NO: 25721 - RNA, 22 nt, synthetic construct
  source 1..22: mol_type = other RNA
tttgaaaagtatcttggggcca

SEQ ID NO: 25722 - RNA, 22 nt, synthetic construct
  source 1..22: mol_type = other RNA
tttgaagaataaaccgtgactt

SEQ ID NO: 25723 - RNA, 22 nt, synthetic construct
  source 1..22: mol_type = other RNA
tttgatgggggctattatgaac

SEQ ID NO: 25724 - RNA, 22 nt, synthetic construct
  source 1..22: mol_type = other RNA
tttggccagagtggaaatggaa

SEQ ID NO: 25725 - RNA, 22 nt, synthetic construct
  source 1..22: mol_type = other RNA
tttggccccaagatacttttca

SEQ ID NO: 25726 - RNA, 22 nt, synthetic construct
  source 1..22: mol_type = other RNA
tttgggatggaatctcattcca

SEQ ID NO: 25727 - RNA, 22 nt, synthetic construct
  source 1..22: mol_type = other RNA
tttggtcatcgatttctcccaa

SEQ ID NO: 25728 - RNA, 22 nt, synthetic construct
  source 1..22: mol_type = other RNA
tttggttcctgctcctgccttg

SEQ ID NO: 25729 - RNA, 22 nt, synthetic construct
  source 1..22: mol_type = other RNA
ttttaagagcctttctctggag

SEQ ID NO: 25730 - RNA, 22 nt, synthetic construct
  source 1..22: mol_type = other RNA
ttttattttttgggatggaatc

SEQ ID NO: 25731 - RNA, 22 nt, synthetic construct
  source 1..22: mol_type = other RNA
ttttcaaagttcatttctcagt

SEQ ID NO: 25732 - RNA, 22 nt, synthetic construct
  source 1..22: mol_type = other RNA
ttttctaaactgtatgaagtgt

SEQ ID NO: 25733 - RNA, 22 nt, synthetic construct
  source 1..22: mol_type = other RNA
ttttctagcagatttctagcag

SEQ ID NO: 25734 - RNA, 22 nt, synthetic construct
  source 1..22: mol_type = other RNA
ttttcttatgtttatgcctttc

SEQ ID NO: 25735 - RNA, 22 nt, synthetic construct
  source 1..22: mol_type = other RNA
ttttgaagaataaaccgtgact

SEQ ID NO: 25736 - RNA, 22 nt, synthetic construct
  source 1..22: mol_type = other RNA
ttttgggatggaatctcattcc

SEQ ID NO: 25737 - RNA, 22 nt, synthetic construct
  source 1..22: mol_type = other RNA
ttttggttcctgctcctgcctt

SEQ ID NO: 25738 - RNA, 22 nt, synthetic construct
  source 1..22: mol_type = other RNA
tttttaagagcctttctctgga

SEQ ID NO: 25739 - RNA, 22 nt, synthetic construct
  source 1..22: mol_type = other RNA
tttttctagcagatttctagca

SEQ ID NO: 25740 - RNA, 22 nt, synthetic construct
  source 1..22: mol_type = other RNA
tttttgggatggaatctcattc

SEQ ID NO: 25741 - RNA, 22 nt, synthetic construct
  source 1..22: mol_type = other RNA
tttttggttcctgctcctgcct

SEQ ID NO: 25742 - RNA, 22 nt, synthetic construct
  source 1..22: mol_type = other RNA
ttttttctagcagatttctagc

SEQ ID NO: 25743 - RNA, 22 nt, synthetic construct
  source 1..22: mol_type = other RNA
ttttttgggatggaatctcatt

SEQ ID NO: 25744 - RNA, 20 nt, synthetic construct
  source 1..20: mol_type = other RNA
aaaaaaggaagacattaagt

SEQ ID NO: 25745 - RNA, 20 nt, synthetic construct
  source 1..20: mol_type = other RNA
aaaaaaggtctatggccata

SEQ ID NO: 25746 - RNA, 20 nt, synthetic construct
  source 1..20: mol_type = other RNA
aaaaagacagtggagaaaaa

SEQ ID NO: 25747 - RNA, 20 nt, synthetic construct
  source 1..20: mol_type = other RNA
aaaaaggaagacattaagtt

SEQ ID NO: 25748 - RNA, 20 nt, synthetic construct
  source 1..20: mol_type = other RNA
aaaaaggtctatggccatac

SEQ ID NO: 25749 - RNA, 20 nt, synthetic construct
  source 1..20: mol_type = other RNA
aaaacttaatgtcttccttt

SEQ ID NO: 25750 - RNA, 20 nt, synthetic construct
  source 1..20: mol_type = other RNA
aaaagacagtggagaaaaaa

SEQ ID NO: 25751 - RNA, 20 nt, synthetic construct
  source 1..20: mol_type = other RNA
aaaagctagaggaagccagt

SEQ ID NO: 25752 - RNA, 20 nt, synthetic construct
  source 1..20: mol_type = other RNA
aaaaggaagacattaagttt

SEQ ID NO: 25753 - RNA, 20 nt, synthetic construct
  source 1..20: mol_type = other RNA
aaaataccatgtactaacaa

SEQ ID NO: 25754 - RNA, 20 nt, synthetic construct
  source 1..20: mol_type = other RNA
aaaatggttagaaataaggc

SEQ ID NO: 25755 - RNA, 20 nt, synthetic construct
  source 1..20: mol_type = other RNA
aaacaaaggcctataccttc

SEQ ID NO: 25756 - RNA, 20 nt, synthetic construct
  source 1..20: mol_type = other RNA
aaacaatctgcatattggga

SEQ ID NO: 25757 - RNA, 20 nt, synthetic construct
  source 1..20: mol_type = other RNA
aaacaatgtattcatgggta

SEQ ID NO: 25758 - RNA, 20 nt, synthetic construct
  source 1..20: mol_type = other RNA
aaaccatgctgtgcatcagt

SEQ ID NO: 25759 - RNA, 20 nt, synthetic construct
  source 1..20: mol_type = other RNA
aaactactggttcagaaacc

SEQ ID NO: 25760 - RNA, 20 nt, synthetic construct
  source 1..20: mol_type = other RNA
aaacttaatgtcttcctttt

SEQ ID NO: 25761 - RNA, 20 nt, synthetic construct
  source 1..20: mol_type = other RNA
aaagatcagattagtggcac

SEQ ID NO: 25762 - RNA, 20 nt, synthetic construct
  source 1..20: mol_type = other RNA
aaagcagctttatgatatga

SEQ ID NO: 25763 - RNA, 20 nt, synthetic construct
  source 1..20: mol_type = other RNA
aaagctagaggaagccagta

SEQ ID NO: 25764 - RNA, 20 nt, synthetic construct
  source 1..20: mol_type = other RNA
aaagctgctttgatataaaa

SEQ ID NO: 25765 - RNA, 20 nt, synthetic construct
  source 1..20: mol_type = other RNA
aaaggaagacattaagtttt

SEQ ID NO: 25766 - RNA, 20 nt, synthetic construct
  source 1..20: mol_type = other RNA
aaaggcctataccttcttga

SEQ ID NO: 25767 - RNA, 20 nt, synthetic construct
  source 1..20: mol_type = other RNA
aaaggtctatggccatacta

SEQ ID NO: 25768 - RNA, 20 nt, synthetic construct
  source 1..20: mol_type = other RNA
aaagtactggagaagtccag

SEQ ID NO: 25769 - RNA, 20 nt, synthetic construct
  source 1..20: mol_type = other RNA
aaagttgtgtatgagtagtc

SEQ ID NO: 25770 - RNA, 20 nt, synthetic construct
  source 1..20: mol_type = other RNA
aaataaggctggcagaatag

SEQ ID NO: 25771 - RNA, 20 nt, synthetic construct
  source 1..20: mol_type = other RNA
aaataccatgtactaacaaa

SEQ ID NO: 25772 - RNA, 20 nt, synthetic construct
  source 1..20: mol_type = other RNA
aaatatacctgaagctgcca

SEQ ID NO: 25773 - RNA, 20 nt, synthetic construct
  source 1..20: mol_type = other RNA
aaatggttagaaataaggct

SEQ ID NO: 25774 - RNA, 20 nt, synthetic construct
  source 1..20: mol_type = other RNA
aaatgtctaaaatggttaga

SEQ ID NO: 25775 - RNA, 20 nt, synthetic construct
  source 1..20: mol_type = other RNA
aacaaaggcctataccttct

SEQ ID NO: 25776 - RNA, 20 nt, synthetic construct
  source 1..20: mol_type = other RNA
aacaaatgtctaaaatggtt

SEQ ID NO: 25777 - RNA, 20 nt, synthetic construct
  source 1..20: mol_type = other RNA
aacaagcccttcctactagc

SEQ ID NO: 25778 - RNA, 20 nt, synthetic construct
  source 1..20: mol_type = other RNA
aacaatctgcatattgggat

SEQ ID NO: 25779 - RNA, 20 nt, synthetic construct
  source 1..20: mol_type = other RNA
aacaatgtattcatgggtag

SEQ ID NO: 25780 - RNA, 20 nt, synthetic construct
  source 1..20: mol_type = other RNA
aacacttcttacctactggc

SEQ ID NO: 25781 - RNA, 20 nt, synthetic construct
  source 1..20: mol_type = other RNA
aacagcagcctattctgcca

SEQ ID NO: 25782 - RNA, 20 nt, synthetic construct
  source 1..20: mol_type = other RNA
aacatctcaagaaggtatag

SEQ ID NO: 25783 - RNA, 20 nt, synthetic construct
  source 1..20: mol_type = other RNA
aacattccctgacaatccca

SEQ ID NO: 25784 - RNA, 20 nt, synthetic construct
  source 1..20: mol_type = other RNA
aaccagtagtttccctgcag

SEQ ID NO: 25785 - RNA, 20 nt, synthetic construct
  source 1..20: mol_type = other RNA
aaccatgctgtgcatcagta

SEQ ID NO: 25786 - RNA, 20 nt, synthetic construct
  source 1..20: mol_type = other RNA
aaccattttagacatttgtt

SEQ ID NO: 25787 - RNA, 20 nt, synthetic construct
  source 1..20: mol_type = other RNA
aacgaacatctcaagaaggt

SEQ ID NO: 25788 - RNA, 20 nt, synthetic construct
  source 1..20: mol_type = other RNA
aactactggttcagaaacca

SEQ ID NO: 25789 - RNA, 20 nt, synthetic construct
  source 1..20: mol_type = other RNA
aactgcagggaaactactgg

SEQ ID NO: 25790 - RNA, 20 nt, synthetic construct
  source 1..20: mol_type = other RNA
aacttaatgtcttccttttt

SEQ ID NO: 25791 - RNA, 20 nt, synthetic construct
  source 1..20: mol_type = other RNA
aactttcagcagcttacaaa

SEQ ID NO: 25792 - RNA, 20 nt, synthetic construct
  source 1..20: mol_type = other RNA
aagaacattccctgacaatc

SEQ ID NO: 25793 - RNA, 20 nt, synthetic construct
  source 1..20: mol_type = other RNA
aagaaggtataggcctttgt

SEQ ID NO: 25794 - RNA, 20 nt, synthetic construct
  source 1..20: mol_type = other RNA
aagaagtgttaagagtgtat

SEQ ID NO: 25795 - RNA, 20 nt, synthetic construct
  source 1..20: mol_type = other RNA
aagagtgtatatgtatttgt

SEQ ID NO: 25796 - RNA, 20 nt, synthetic construct
  source 1..20: mol_type = other RNA
aagatcagattagtggcacc

SEQ ID NO: 25797 - RNA, 20 nt, synthetic construct
  source 1..20: mol_type = other RNA
aagcagctttatgatatgac

SEQ ID NO: 25798 - RNA, 20 nt, synthetic construct
  source 1..20: mol_type = other RNA
aagccagtaggtaagaagtg

SEQ ID NO: 25799 - RNA, 20 nt, synthetic construct
  source 1..20: mol_type = other RNA
aagcccttcctactagcctc

SEQ ID NO: 25800 - RNA, 20 nt, synthetic construct
  source 1..20: mol_type = other RNA
aagctagaggaagccagtag

SEQ ID NO: 25801 - RNA, 20 nt, synthetic construct
  source 1..20: mol_type = other RNA
aagctgccacaaaagctaga

SEQ ID NO: 25802 - RNA, 20 nt, synthetic construct
  source 1..20: mol_type = other RNA
aagctgctgaaagttgtgta

SEQ ID NO: 25803 - RNA, 20 nt, synthetic construct
  source 1..20: mol_type = other RNA
aagctgctttgatataaaaa

SEQ ID NO: 25804 - RNA, 20 nt, synthetic construct
  source 1..20: mol_type = other RNA
aaggaagacattaagtttta

SEQ ID NO: 25805 - RNA, 20 nt, synthetic construct
  source 1..20: mol_type = other RNA
aaggcctataccttcttgag

SEQ ID NO: 25806 - RNA, 20 nt, synthetic construct
  source 1..20: mol_type = other RNA
aaggctggcagaataggctg

SEQ ID NO: 25807 - RNA, 20 nt, synthetic construct
  source 1..20: mol_type = other RNA
aagggcttgttcctgctggg

SEQ ID NO: 25808 - RNA, 20 nt, synthetic construct
  source 1..20: mol_type = other RNA
aaggtataggcctttgtttg

SEQ ID NO: 25809 - RNA, 20 nt, synthetic construct
  source 1..20: mol_type = other RNA
aaggtctatggccatactac

SEQ ID NO: 25810 - RNA, 20 nt, synthetic construct
  source 1..20: mol_type = other RNA
aagtaaaacttaatgtcttc

SEQ ID NO: 25811 - RNA, 20 nt, synthetic construct
  source 1..20: mol_type = other RNA
aagtactggagaagtccagg

SEQ ID NO: 25812 - RNA, 20 nt, synthetic construct
  source 1..20: mol_type = other RNA
aagtccaggattataggatg

SEQ ID NO: 25813 - RNA, 20 nt, synthetic construct
  source 1..20: mol_type = other RNA
aagtcctgctgtcctagcat

SEQ ID NO: 25814 - RNA, 20 nt, synthetic construct
  source 1..20: mol_type = other RNA
aagtcttacattcttttgta

SEQ ID NO: 25815 - RNA, 20 nt, synthetic construct
  source 1..20: mol_type = other RNA
aagtgctgctgctgctccct

SEQ ID NO: 25816 - RNA, 20 nt, synthetic construct
  source 1..20: mol_type = other RNA
aagtgttaagagtgtatatg

SEQ ID NO: 25817 - RNA, 20 nt, synthetic construct
  source 1..20: mol_type = other RNA
aagttgtgtatgagtagtca

SEQ ID NO: 25818 - RNA, 20 nt, synthetic construct
  source 1..20: mol_type = other RNA
aataaggctggcagaatagg

SEQ ID NO: 25819 - RNA, 20 nt, synthetic construct
  source 1..20: mol_type = other RNA
aatacatatacactcttaac

SEQ ID NO: 25820 - RNA, 20 nt, synthetic construct
  source 1..20: mol_type = other RNA
aatacattgtttagagctac

SEQ ID NO: 25821 - RNA, 20 nt, synthetic construct
  source 1..20: mol_type = other RNA
aataccatgtactaacaaat

SEQ ID NO: 25822 - RNA, 20 nt, synthetic construct
  source 1..20: mol_type = other RNA
aataggctgctgttcctacc

SEQ ID NO: 25823 - RNA, 20 nt, synthetic construct
  source 1..20: mol_type = other RNA
aatatacctgaagctgccac

SEQ ID NO: 25824 - RNA, 20 nt, synthetic construct
  source 1..20: mol_type = other RNA
aatccagccagaaagtactg

SEQ ID NO: 25825 - RNA, 20 nt, synthetic construct
  source 1..20: mol_type = other RNA
aatcccaatatgcagattgt

SEQ ID NO: 25826 - RNA, 20 nt, synthetic construct
  source 1..20: mol_type = other RNA
aatcctggacttctccagta

SEQ ID NO: 25827 - RNA, 20 nt, synthetic construct
  source 1..20: mol_type = other RNA
aatctgatctttaagaacat

SEQ ID NO: 25828 - RNA, 20 nt, synthetic construct
  source 1..20: mol_type = other RNA
aatctgcatattgggattgt

SEQ ID NO: 25829 - RNA, 20 nt, synthetic construct
  source 1..20: mol_type = other RNA
aatgagtcccatcccatctg

SEQ ID NO: 25830 - RNA, 20 nt, synthetic construct
  source 1..20: mol_type = other RNA
aatggttagaaataaggctg

SEQ ID NO: 25831 - RNA, 20 nt, synthetic construct
  source 1..20: mol_type = other RNA
aatgtattcatgggtaggaa

SEQ ID NO: 25832 - RNA, 20 nt, synthetic construct
  source 1..20: mol_type = other RNA
aatgtctaaaatggttagaa

SEQ ID NO: 25833 - RNA, 20 nt, synthetic construct
  source 1..20: mol_type = other RNA
aatgttcttaaagatcagat

SEQ ID NO: 25834 - RNA, 20 nt, synthetic construct
  source 1..20: mol_type = other RNA
acaaaagctagaggaagcca

SEQ ID NO: 25835 - RNA, 20 nt, synthetic construct
  source 1..20: mol_type = other RNA
acaaacaaaggcctatacct

SEQ ID NO: 25836 - RNA, 20 nt, synthetic construct
  source 1..20: mol_type = other RNA
acaaaggcctataccttctt

SEQ ID NO: 25837 - RNA, 20 nt, synthetic construct
  source 1..20: mol_type = other RNA
acaaatacatatacactctt

SEQ ID NO: 25838 - RNA, 20 nt, synthetic construct
  source 1..20: mol_type = other RNA
acaaatgtctaaaatggtta

SEQ ID NO: 25839 - RNA, 20 nt, synthetic construct
  source 1..20: mol_type = other RNA
acaactttcagcagcttaca

SEQ ID NO: 25840 - RNA, 20 nt, synthetic construct
  source 1..20: mol_type = other RNA
acaagcccttcctactagcc

SEQ ID NO: 25841 - RNA, 20 nt, synthetic construct
  source 1..20: mol_type = other RNA
acaatcccaatatgcagatt

SEQ ID NO: 25842 - RNA, 20 nt, synthetic construct
  source 1..20: mol_type = other RNA
acaatctgcatattgggatt

SEQ ID NO: 25843 - RNA, 20 nt, synthetic construct
  source 1..20: mol_type = other RNA
acaatgtattcatgggtagg

SEQ ID NO: 25844 - RNA, 20 nt, synthetic construct
  source 1..20: mol_type = other RNA
acacaactttcagcagctta

SEQ ID NO: 25845 - RNA, 20 nt, synthetic construct
  source 1..20: mol_type = other RNA
acactcttaacacttcttac

SEQ ID NO: 25846 - RNA, 20 nt, synthetic construct
  source 1..20: mol_type = other RNA
acacttcttacctactggct

SEQ ID NO: 25847 - RNA, 20 nt, synthetic construct
  source 1..20: mol_type = other RNA
acagcagcctattctgccag

SEQ ID NO: 25848 - RNA, 20 nt, synthetic construct
  source 1..20: mol_type = other RNA
acagcaggacttacaaacaa

SEQ ID NO: 25849 - RNA, 20 nt, synthetic construct
  source 1..20: mol_type = other RNA
acagcatggtttctgaacca

SEQ ID NO: 25850 - RNA, 20 nt, synthetic construct
  source 1..20: mol_type = other RNA
acatatacactcttaacact

SEQ ID NO: 25851 - RNA, 20 nt, synthetic construct
  source 1..20: mol_type = other RNA
acatctcaagaaggtatagg

SEQ ID NO: 25852 - RNA, 20 nt, synthetic construct
  source 1..20: mol_type = other RNA
acattccctgacaatcccaa

SEQ ID NO: 25853 - RNA, 20 nt, synthetic construct
  source 1..20: mol_type = other RNA
acattcttttgtaagctgct

SEQ ID NO: 25854 - RNA, 20 nt, synthetic construct
  source 1..20: mol_type = other RNA
acattgtttagagctaccca

SEQ ID NO: 25855 - RNA, 20 nt, synthetic construct
  source 1..20: mol_type = other RNA
acatttgttagtacatggta

SEQ ID NO: 25856 - RNA, 20 nt, synthetic construct
  source 1..20: mol_type = other RNA
accaatccagccagaaagta

SEQ ID NO: 25857 - RNA, 20 nt, synthetic construct
  source 1..20: mol_type = other RNA
accagtagtttccctgcagt

SEQ ID NO: 25858 - RNA, 20 nt, synthetic construct
  source 1..20: mol_type = other RNA
accatgctgtgcatcagtat

SEQ ID NO: 25859 - RNA, 20 nt, synthetic construct
  source 1..20: mol_type = other RNA
accatgtactaacaaatgtc

SEQ ID NO: 25860 - RNA, 20 nt, synthetic construct
  source 1..20: mol_type = other RNA
accattttagacatttgtta

SEQ ID NO: 25861 - RNA, 20 nt, synthetic construct
  source 1..20: mol_type = other RNA
acccagcaggaacaagccct

SEQ ID NO: 25862 - RNA, 20 nt, synthetic construct
  source 1..20: mol_type = other RNA
acccatgaatacattgttta

SEQ ID NO: 25863 - RNA, 20 nt, synthetic construct
  source 1..20: mol_type = other RNA
accctgaatgagtcccatcc

SEQ ID NO: 25864 - RNA, 20 nt, synthetic construct
  source 1..20: mol_type = other RNA
acctactggcttcctctagc

SEQ ID NO: 25865 - RNA, 20 nt, synthetic construct
  source 1..20: mol_type = other RNA
acctgaagctgccacaaaag

SEQ ID NO: 25866 - RNA, 20 nt, synthetic construct
  source 1..20: mol_type = other RNA
acctgctgagatactgatgc

SEQ ID NO: 25867 - RNA, 20 nt, synthetic construct
  source 1..20: mol_type = other RNA
accttcttgagatgttcgtt

SEQ ID NO: 25868 - RNA, 20 nt, synthetic construct
  source 1..20: mol_type = other RNA
accttttttatatcaaagca

SEQ ID NO: 25869 - RNA, 20 nt, synthetic construct
  source 1..20: mol_type = other RNA
acgaacatctcaagaaggta

SEQ ID NO: 25870 - RNA, 20 nt, synthetic construct
  source 1..20: mol_type = other RNA
actaacaaatgtctaaaatg

SEQ ID NO: 25871 - RNA, 20 nt, synthetic construct
  source 1..20: mol_type = other RNA
actaatctgatctttaagaa

SEQ ID NO: 25872 - RNA, 20 nt, synthetic construct
  source 1..20: mol_type = other RNA
actaccctgaatgagtccca

SEQ ID NO: 25873 - RNA, 20 nt, synthetic construct
  source 1..20: mol_type = other RNA
actactcatacacaactttc

SEQ ID NO: 25874 - RNA, 20 nt, synthetic construct
  source 1..20: mol_type = other RNA
actactggttcagaaaccat

SEQ ID NO: 25875 - RNA, 20 nt, synthetic construct
  source 1..20: mol_type = other RNA
actagcctcagataccaatc

SEQ ID NO: 25876 - RNA, 20 nt, synthetic construct
  source 1..20: mol_type = other RNA
actcatacacaactttcagc

SEQ ID NO: 25877 - RNA, 20 nt, synthetic construct
  source 1..20: mol_type = other RNA
actcattcagggtagtatgg

SEQ ID NO: 25878 - RNA, 20 nt, synthetic construct
  source 1..20: mol_type = other RNA
actcttaacacttcttacct

SEQ ID NO: 25879 - RNA, 20 nt, synthetic construct
  source 1..20: mol_type = other RNA
actgaacgaacatctcaaga

SEQ ID NO: 25880 - RNA, 20 nt, synthetic construct
  source 1..20: mol_type = other RNA
actgatgcacagcatggttt

SEQ ID NO: 25881 - RNA, 20 nt, synthetic construct
  source 1..20: mol_type = other RNA
actgcagggaaactactggt

SEQ ID NO: 25882 - RNA, 20 nt, synthetic construct
  source 1..20: mol_type = other RNA
actggagaagtccaggatta

SEQ ID NO: 25883 - RNA, 20 nt, synthetic construct
  source 1..20: mol_type = other RNA
actggcttcctctagctttt

SEQ ID NO: 25884 - RNA, 20 nt, synthetic construct
  source 1..20: mol_type = other RNA
actggttcagaaaccatgct

SEQ ID NO: 25885 - RNA, 20 nt, synthetic construct
  source 1..20: mol_type = other RNA
acttaatgtcttcctttttt

SEQ ID NO: 25886 - RNA, 20 nt, synthetic construct
  source 1..20: mol_type = other RNA
acttacaaacaaaggcctat

SEQ ID NO: 25887 - RNA, 20 nt, synthetic construct
  source 1..20: mol_type = other RNA
acttctccagtactttctgg

SEQ ID NO: 25888 - RNA, 20 nt, synthetic construct
  source 1..20: mol_type = other RNA
acttcttacctactggcttc

SEQ ID NO: 25889 - RNA, 20 nt, synthetic construct
  source 1..20: mol_type = other RNA
acttgcacaaatacatatac

SEQ ID NO: 25890 - RNA, 20 nt, synthetic construct
  source 1..20: mol_type = other RNA
actttcagcagcttacaaaa

SEQ ID NO: 25891 - RNA, 20 nt, synthetic construct
  source 1..20: mol_type = other RNA
actttctggctggattggta

SEQ ID NO: 25892 - RNA, 20 nt, synthetic construct
  source 1..20: mol_type = other RNA
acttttaaaataccatgtac

SEQ ID NO: 25893 - RNA, 20 nt, synthetic construct
  source 1..20: mol_type = other RNA
agaaaccatgctgtgcatca

SEQ ID NO: 25894 - RNA, 20 nt, synthetic construct
  source 1..20: mol_type = other RNA
agaaagtactggagaagtcc

SEQ ID NO: 25895 - RNA, 20 nt, synthetic construct
  source 1..20: mol_type = other RNA
agaaataaggctggcagaat

SEQ ID NO: 25896 - RNA, 20 nt, synthetic construct
  source 1..20: mol_type = other RNA
agaacattccctgacaatcc

SEQ ID NO: 25897 - RNA, 20 nt, synthetic construct
  source 1..20: mol_type = other RNA
agaaggtataggcctttgtt

SEQ ID NO: 25898 - RNA, 20 nt, synthetic construct
  source 1..20: mol_type = other RNA
agaagtccaggattatagga

SEQ ID NO: 25899 - RNA, 20 nt, synthetic construct
  source 1..20: mol_type = other RNA
agaagtgttaagagtgtata

SEQ ID NO: 25900 - RNA, 20 nt, synthetic construct
  source 1..20: mol_type = other RNA
agaataggctgctgttccta

SEQ ID NO: 25901 - RNA, 20 nt, synthetic construct
  source 1..20: mol_type = other RNA
agacatttgttagtacatgg

SEQ ID NO: 25902 - RNA, 20 nt, synthetic construct
  source 1..20: mol_type = other RNA
agaccttttttatatcaaag

SEQ ID NO: 25903 - RNA, 20 nt, synthetic construct
  source 1..20: mol_type = other RNA
agagctacccagcaggaaca

SEQ ID NO: 25904 - RNA, 20 nt, synthetic construct
  source 1..20: mol_type = other RNA
agaggaagccagtaggtaag

SEQ ID NO: 25905 - RNA, 20 nt, synthetic construct
  source 1..20: mol_type = other RNA
agagtgtatatgtatttgtg

SEQ ID NO: 25906 - RNA, 20 nt, synthetic construct
  source 1..20: mol_type = other RNA
agataccaatccagccagaa

SEQ ID NO: 25907 - RNA, 20 nt, synthetic construct
  source 1..20: mol_type = other RNA
agatactgatgcacagcatg

SEQ ID NO: 25908 - RNA, 20 nt, synthetic construct
  source 1..20: mol_type = other RNA
agatcagattagtggcacct

SEQ ID NO: 25909 - RNA, 20 nt, synthetic construct
  source 1..20: mol_type = other RNA
agatgggatgggactcattc

SEQ ID NO: 25910 - RNA, 20 nt, synthetic construct
  source 1..20: mol_type = other RNA
agatgttcgttcagtgctaa

SEQ ID NO: 25911 - RNA, 20 nt, synthetic construct
  source 1..20: mol_type = other RNA
agattagtggcacctgctga

SEQ ID NO: 25912 - RNA, 20 nt, synthetic construct
  source 1..20: mol_type = other RNA
agattgtttatatcagatgg

SEQ ID NO: 25913 - RNA, 20 nt, synthetic construct
  source 1..20: mol_type = other RNA
agcactgaacgaacatctca

SEQ ID NO: 25914 - RNA, 20 nt, synthetic construct
  source 1..20: mol_type = other RNA
agcacttgcacaaatacata

SEQ ID NO: 25915 - RNA, 20 nt, synthetic construct
  source 1..20: mol_type = other RNA
agcagcacttgcacaaatac

SEQ ID NO: 25916 - RNA, 20 nt, synthetic construct
  source 1..20: mol_type = other RNA
agcagcagcacttgcacaaa

SEQ ID NO: 25917 - RNA, 20 nt, synthetic construct
  source 1..20: mol_type = other RNA
agcagcagcagcacttgcac

SEQ ID NO: 25918 - RNA, 20 nt, synthetic construct
  source 1..20: mol_type = other RNA
agcagcctattctgccagcc

SEQ ID NO: 25919 - RNA, 20 nt, synthetic construct
  source 1..20: mol_type = other RNA
agcagcttacaaaagaatgt

SEQ ID NO: 25920 - RNA, 20 nt, synthetic construct
  source 1..20: mol_type = other RNA
agcagctttatgatatgact

SEQ ID NO: 25921 - RNA, 20 nt, synthetic construct
  source 1..20: mol_type = other RNA
agcaggaacaagcccttcct

SEQ ID NO: 25922 - RNA, 20 nt, synthetic construct
  source 1..20: mol_type = other RNA
agcaggacttacaaacaaag

SEQ ID NO: 25923 - RNA, 20 nt, synthetic construct
  source 1..20: mol_type = other RNA
agcagggagcagcagcagca

SEQ ID NO: 25924 - RNA, 20 nt, synthetic construct
  source 1..20: mol_type = other RNA
agcaggtgccactaatctga

SEQ ID NO: 25925 - RNA, 20 nt, synthetic construct
  source 1..20: mol_type = other RNA
agcatcctataatcctggac

SEQ ID NO: 25926 - RNA, 20 nt, synthetic construct
  source 1..20: mol_type = other RNA
agcatggtttctgaaccagt

SEQ ID NO: 25927 - RNA, 20 nt, synthetic construct
  source 1..20: mol_type = other RNA
agccagaaagtactggagaa

SEQ ID NO: 25928 - RNA, 20 nt, synthetic construct
  source 1..20: mol_type = other RNA
agccagtaggtaagaagtgt

SEQ ID NO: 25929 - RNA, 20 nt, synthetic construct
  source 1..20: mol_type = other RNA
agcccttcctactagcctca

SEQ ID NO: 25930 - RNA, 20 nt, synthetic construct
  source 1..20: mol_type = other RNA
agcctattctgccagcctta

SEQ ID NO: 25931 - RNA, 20 nt, synthetic construct
  source 1..20: mol_type = other RNA
agcctcagataccaatccag

SEQ ID NO: 25932 - RNA, 20 nt, synthetic construct
  source 1..20: mol_type = other RNA
agccttatttctaaccattt

SEQ ID NO: 25933 - RNA, 20 nt, synthetic construct
  source 1..20: mol_type = other RNA
agctacccagcaggaacaag

SEQ ID NO: 25934 - RNA, 20 nt, synthetic construct
  source 1..20: mol_type = other RNA
agctagaggaagccagtagg

SEQ ID NO: 25935 - RNA, 20 nt, synthetic construct
  source 1..20: mol_type = other RNA
agctctaaacaatgtattca

SEQ ID NO: 25936 - RNA, 20 nt, synthetic construct
  source 1..20: mol_type = other RNA
agctgccacaaaagctagag

SEQ ID NO: 25937 - RNA, 20 nt, synthetic construct
  source 1..20: mol_type = other RNA
agctgctgaaagttgtgtat

SEQ ID NO: 25938 - RNA, 20 nt, synthetic construct
  source 1..20: mol_type = other RNA
agctgctttgatataaaaaa

SEQ ID NO: 25939 - RNA, 20 nt, synthetic construct
  source 1..20: mol_type = other RNA
agcttcaggtatatttagca

SEQ ID NO: 25940 - RNA, 20 nt, synthetic construct
  source 1..20: mol_type = other RNA
agctttatgatatgactact

SEQ ID NO: 25941 - RNA, 20 nt, synthetic construct
  source 1..20: mol_type = other RNA
agcttttgtggcagcttcag

SEQ ID NO: 25942 - RNA, 20 nt, synthetic construct
  source 1..20: mol_type = other RNA
aggaacaagcccttcctact

SEQ ID NO: 25943 - RNA, 20 nt, synthetic construct
  source 1..20: mol_type = other RNA
aggaacagcagcctattctg

SEQ ID NO: 25944 - RNA, 20 nt, synthetic construct
  source 1..20: mol_type = other RNA
aggaagacattaagttttac

SEQ ID NO: 25945 - RNA, 20 nt, synthetic construct
  source 1..20: mol_type = other RNA
aggaagccagtaggtaagaa

SEQ ID NO: 25946 - RNA, 20 nt, synthetic construct
  source 1..20: mol_type = other RNA
aggaagggcttgttcctgct

SEQ ID NO: 25947 - RNA, 20 nt, synthetic construct
  source 1..20: mol_type = other RNA
aggacagcaggacttacaaa

SEQ ID NO: 25948 - RNA, 20 nt, synthetic construct
  source 1..20: mol_type = other RNA
aggacttacaaacaaaggcc

SEQ ID NO: 25949 - RNA, 20 nt, synthetic construct
  source 1..20: mol_type = other RNA
aggatgctaggacagcagga

SEQ ID NO: 25950 - RNA, 20 nt, synthetic construct
  source 1..20: mol_type = other RNA
aggattataggatgctagga

SEQ ID NO: 25951 - RNA, 20 nt, synthetic construct
  source 1..20: mol_type = other RNA
aggcctataccttcttgaga

SEQ ID NO: 25952 - RNA, 20 nt, synthetic construct
  source 1..20: mol_type = other RNA
aggcctttgtttgtaagtcc

SEQ ID NO: 25953 - RNA, 20 nt, synthetic construct
  source 1..20: mol_type = other RNA
aggctagtaggaagggcttg

SEQ ID NO: 25954 - RNA, 20 nt, synthetic construct
  source 1..20: mol_type = other RNA
aggctgctgttcctacccat

SEQ ID NO: 25955 - RNA, 20 nt, synthetic construct
  source 1..20: mol_type = other RNA
aggctggcagaataggctgc

SEQ ID NO: 25956 - RNA, 20 nt, synthetic construct
  source 1..20: mol_type = other RNA
agggaaactactggttcaga

SEQ ID NO: 25957 - RNA, 20 nt, synthetic construct
  source 1..20: mol_type = other RNA
agggaatgttcttaaagatc

SEQ ID NO: 25958 - RNA, 20 nt, synthetic construct
  source 1..20: mol_type = other RNA
agggagcagcagcagcactt

SEQ ID NO: 25959 - RNA, 20 nt, synthetic construct
  source 1..20: mol_type = other RNA
agggcttgttcctgctgggt

SEQ ID NO: 25960 - RNA, 20 nt, synthetic construct
  source 1..20: mol_type = other RNA
agggtagtatggccatagac

SEQ ID NO: 25961 - RNA, 20 nt, synthetic construct
  source 1..20: mol_type = other RNA
aggtaagaagtgttaagagt

SEQ ID NO: 25962 - RNA, 20 nt, synthetic construct
  source 1..20: mol_type = other RNA
aggtataggcctttgtttgt

SEQ ID NO: 25963 - RNA, 20 nt, synthetic construct
  source 1..20: mol_type = other RNA
aggtatatttagcactgaac

SEQ ID NO: 25964 - RNA, 20 nt, synthetic construct
  source 1..20: mol_type = other RNA
aggtctatggccatactacc

SEQ ID NO: 25965 - RNA, 20 nt, synthetic construct
  source 1..20: mol_type = other RNA
aggtgccactaatctgatct

SEQ ID NO: 25966 - RNA, 20 nt, synthetic construct
  source 1..20: mol_type = other RNA
agtaaaacttaatgtcttcc

SEQ ID NO: 25967 - RNA, 20 nt, synthetic construct
  source 1..20: mol_type = other RNA
agtacatggtattttaaaag

SEQ ID NO: 25968 - RNA, 20 nt, synthetic construct
  source 1..20: mol_type = other RNA
agtactggagaagtccagga

SEQ ID NO: 25969 - RNA, 20 nt, synthetic construct
  source 1..20: mol_type = other RNA
agtactttctggctggattg

SEQ ID NO: 25970 - RNA, 20 nt, synthetic construct
  source 1..20: mol_type = other RNA
agtaggaagggcttgttcct

SEQ ID NO: 25971 - RNA, 20 nt, synthetic construct
  source 1..20: mol_type = other RNA
agtaggtaagaagtgttaag

SEQ ID NO: 25972 - RNA, 20 nt, synthetic construct
  source 1..20: mol_type = other RNA
agtagtcatatcataaagct

SEQ ID NO: 25973 - RNA, 20 nt, synthetic construct
  source 1..20: mol_type = other RNA
agtagtttccctgcagttga

SEQ ID NO: 25974 - RNA, 20 nt, synthetic construct
  source 1..20: mol_type = other RNA
agtatctcagcaggtgccac

SEQ ID NO: 25975 - RNA, 20 nt, synthetic construct
  source 1..20: mol_type = other RNA
agtatggccatagacctttt

SEQ ID NO: 25976 - RNA, 20 nt, synthetic construct
  source 1..20: mol_type = other RNA
agtcatatcataaagctgct

SEQ ID NO: 25977 - RNA, 20 nt, synthetic construct
  source 1..20: mol_type = other RNA
agtccaggattataggatgc

SEQ ID NO: 25978 - RNA, 20 nt, synthetic construct
  source 1..20: mol_type = other RNA
agtcccatcccatctgatat

SEQ ID NO: 25979 - RNA, 20 nt, synthetic construct
  source 1..20: mol_type = other RNA
agtcctgctgtcctagcatc

SEQ ID NO: 25980 - RNA, 20 nt, synthetic construct
  source 1..20: mol_type = other RNA
agtcttacattcttttgtaa

SEQ ID NO: 25981 - RNA, 20 nt, synthetic construct
  source 1..20: mol_type = other RNA
agtgctaaatatacctgaag

SEQ ID NO: 25982 - RNA, 20 nt, synthetic construct
  source 1..20: mol_type = other RNA
agtgctgctgctgctccctg

SEQ ID NO: 25983 - RNA, 20 nt, synthetic construct
  source 1..20: mol_type = other RNA
agtggcacctgctgagatac

SEQ ID NO: 25984 - RNA, 20 nt, synthetic construct
  source 1..20: mol_type = other RNA
agtgtatatgtatttgtgca

SEQ ID NO: 25985 - RNA, 20 nt, synthetic construct
  source 1..20: mol_type = other RNA
agtgttaagagtgtatatgt

SEQ ID NO: 25986 - RNA, 20 nt, synthetic construct
  source 1..20: mol_type = other RNA
agttgagcagggagcagcag

SEQ ID NO: 25987 - RNA, 20 nt, synthetic construct
  source 1..20: mol_type = other RNA
agttgtgtatgagtagtcat

SEQ ID NO: 25988 - RNA, 20 nt, synthetic construct
  source 1..20: mol_type = other RNA
agtttccctgcagttgagca

SEQ ID NO: 25989 - RNA, 20 nt, synthetic construct
  source 1..20: mol_type = other RNA
ataaaaaaggtctatggcca

SEQ ID NO: 25990 - RNA, 20 nt, synthetic construct
  source 1..20: mol_type = other RNA
ataaacaatctgcatattgg

SEQ ID NO: 25991 - RNA, 20 nt, synthetic construct
  source 1..20: mol_type = other RNA
ataaagctgctttgatataa

SEQ ID NO: 25992 - RNA, 20 nt, synthetic construct
  source 1..20: mol_type = other RNA
ataaggctggcagaataggc

SEQ ID NO: 25993 - RNA, 20 nt, synthetic construct
  source 1..20: mol_type = other RNA
ataatcctggacttctccag

SEQ ID NO: 25994 - RNA, 20 nt, synthetic construct
  source 1..20: mol_type = other RNA
atacacaactttcagcagct

SEQ ID NO: 25995 - RNA, 20 nt, synthetic construct
  source 1..20: mol_type = other RNA
atacactcttaacacttctt

SEQ ID NO: 25996 - RNA, 20 nt, synthetic construct
  source 1..20: mol_type = other RNA
atacatatacactcttaaca

SEQ ID NO: 25997 - RNA, 20 nt, synthetic construct
  source 1..20: mol_type = other RNA
atacattgtttagagctacc

SEQ ID NO: 25998 - RNA, 20 nt, synthetic construct
  source 1..20: mol_type = other RNA
ataccaatccagccagaaag

SEQ ID NO: 25999 - RNA, 20 nt, synthetic construct
  source 1..20: mol_type = other RNA
ataccatgtactaacaaatg

SEQ ID NO: 26000 - RNA, 20 nt, synthetic construct
  source 1..20: mol_type = other RNA
atacctgaagctgccacaaa

SEQ ID NO: 26001 - RNA, 20 nt, synthetic construct
  source 1..20: mol_type = other RNA
ataccttcttgagatgttcg

SEQ ID NO: 26002 - RNA, 20 nt, synthetic construct
  source 1..20: mol_type = other RNA
atactaccctgaatgagtcc

SEQ ID NO: 26003 - RNA, 20 nt, synthetic construct
  source 1..20: mol_type = other RNA
atactgatgcacagcatggt

SEQ ID NO: 26004 - RNA, 20 nt, synthetic construct
  source 1..20: mol_type = other RNA
ataggatgctaggacagcag

SEQ ID NO: 26005 - RNA, 20 nt, synthetic construct
  source 1..20: mol_type = other RNA
ataggcctttgtttgtaagt

SEQ ID NO: 26006 - RNA, 20 nt, synthetic construct
  source 1..20: mol_type = other RNA
ataggctgctgttcctaccc

SEQ ID NO: 26007 - RNA, 20 nt, synthetic construct
  source 1..20: mol_type = other RNA
atataaaaaaggtctatggc

SEQ ID NO: 26008 - RNA, 20 nt, synthetic construct
  source 1..20: mol_type = other RNA
atatacactcttaacacttc

SEQ ID NO: 26009 - RNA, 20 nt, synthetic construct
  source 1..20: mol_type = other RNA
atatacctgaagctgccaca

SEQ ID NO: 26010 - RNA, 20 nt, synthetic construct
  source 1..20: mol_type = other RNA
atatcaaagcagctttatga

SEQ ID NO: 26011 - RNA, 20 nt, synthetic construct
  source 1..20: mol_type = other RNA
atatcagatgggatgggact

SEQ ID NO: 26012 - RNA, 20 nt, synthetic construct
  source 1..20: mol_type = other RNA
atatcataaagctgctttga

SEQ ID NO: 26013 - RNA, 20 nt, synthetic construct
  source 1..20: mol_type = other RNA
atatgactactcatacacaa

SEQ ID NO: 26014 - RNA, 20 nt, synthetic construct
  source 1..20: mol_type = other RNA
atatgcagattgtttatatc

SEQ ID NO: 26015 - RNA, 20 nt, synthetic construct
  source 1..20: mol_type = other RNA
atatgtatttgtgcaagtgc

SEQ ID NO: 26016 - RNA, 20 nt, synthetic construct
  source 1..20: mol_type = other RNA
atattgggattgtcagggaa

SEQ ID NO: 26017 - RNA, 20 nt, synthetic construct
  source 1..20: mol_type = other RNA
atatttagcactgaacgaac

SEQ ID NO: 26018 - RNA, 20 nt, synthetic construct
  source 1..20: mol_type = other RNA
atcaaagcagctttatgata

SEQ ID NO: 26019 - RNA, 20 nt, synthetic construct
  source 1..20: mol_type = other RNA
atcagatgggatgggactca

SEQ ID NO: 26020 - RNA, 20 nt, synthetic construct
  source 1..20: mol_type = other RNA
atcagattagtggcacctgc

SEQ ID NO: 26021 - RNA, 20 nt, synthetic construct
  source 1..20: mol_type = other RNA
atcagtatctcagcaggtgc

SEQ ID NO: 26022 - RNA, 20 nt, synthetic construct
  source 1..20: mol_type = other RNA
atcataaagctgctttgata

SEQ ID NO: 26023 - RNA, 20 nt, synthetic construct
  source 1..20: mol_type = other RNA
atccagccagaaagtactgg

SEQ ID NO: 26024 - RNA, 20 nt, synthetic construct
  source 1..20: mol_type = other RNA
atcccaatatgcagattgtt

SEQ ID NO: 26025 - RNA, 20 nt, synthetic construct
  source 1..20: mol_type = other RNA
atcccatctgatataaacaa

SEQ ID NO: 26026 - RNA, 20 nt, synthetic construct
  source 1..20: mol_type = other RNA
atcctataatcctggacttc

SEQ ID NO: 26027 - RNA, 20 nt, synthetic construct
  source 1..20: mol_type = other RNA
atcctggacttctccagtac

SEQ ID NO: 26028 - RNA, 20 nt, synthetic construct
  source 1..20: mol_type = other RNA
atctcaagaaggtataggcc

SEQ ID NO: 26029 - RNA, 20 nt, synthetic construct
  source 1..20: mol_type = other RNA
atctcagcaggtgccactaa

SEQ ID NO: 26030 - RNA, 20 nt, synthetic construct
  source 1..20: mol_type = other RNA
atctgaggctagtaggaagg

SEQ ID NO: 26031 - RNA, 20 nt, synthetic construct
  source 1..20: mol_type = other RNA
atctgatataaacaatctgc

SEQ ID NO: 26032 - RNA, 20 nt, synthetic construct
  source 1..20: mol_type = other RNA
atctgatctttaagaacatt

SEQ ID NO: 26033 - RNA, 20 nt, synthetic construct
  source 1..20: mol_type = other RNA
atctgcatattgggattgtc

SEQ ID NO: 26034 - RNA, 20 nt, synthetic construct
  source 1..20: mol_type = other RNA
atctttaagaacattccctg

SEQ ID NO: 26035 - RNA, 20 nt, synthetic construct
  source 1..20: mol_type = other RNA
atgaaaaagacagtggagaa

SEQ ID NO: 26036 - RNA, 20 nt, synthetic construct
  source 1..20: mol_type = other RNA
atgaatacattgtttagagc

SEQ ID NO: 26037 - RNA, 20 nt, synthetic construct
  source 1..20: mol_type = other RNA
atgactactcatacacaact

SEQ ID NO: 26038 - RNA, 20 nt, synthetic construct
  source 1..20: mol_type = other RNA
atgagtagtcatatcataaa

SEQ ID NO: 26039 - RNA, 20 nt, synthetic construct
  source 1..20: mol_type = other RNA
atgagtcccatcccatctga

SEQ ID NO: 26040 - RNA, 20 nt, synthetic construct
  source 1..20: mol_type = other RNA
atgatatgactactcataca

SEQ ID NO: 26041 - RNA, 20 nt, synthetic construct
  source 1..20: mol_type = other RNA
atgcacagcatggtttctga

SEQ ID NO: 26042 - RNA, 20 nt, synthetic construct
  source 1..20: mol_type = other RNA
atgcagattgtttatatcag

SEQ ID NO: 26043 - RNA, 20 nt, synthetic construct
  source 1..20: mol_type = other RNA
atgctaggacagcaggactt

SEQ ID NO: 26044 - RNA, 20 nt, synthetic construct
  source 1..20: mol_type = other RNA
atgctgtgcatcagtatctc

SEQ ID NO: 26045 - RNA, 20 nt, synthetic construct
  source 1..20: mol_type = other RNA
atggccatactaccctgaat

SEQ ID NO: 26046 - RNA, 20 nt, synthetic construct
  source 1..20: mol_type = other RNA
atggccatagacctttttta

SEQ ID NO: 26047 - RNA, 20 nt, synthetic construct
  source 1..20: mol_type = other RNA
atgggactcattcagggtag

SEQ ID NO: 26048 - RNA, 20 nt, synthetic construct
  source 1..20: mol_type = other RNA
atgggatgggactcattcag

SEQ ID NO: 26049 - RNA, 20 nt, synthetic construct
  source 1..20: mol_type = other RNA
atgggtaggaacagcagcct

SEQ ID NO: 26050 - RNA, 20 nt, synthetic construct
  source 1..20: mol_type = other RNA
atggttagaaataaggctgg

SEQ ID NO: 26051 - RNA, 20 nt, synthetic construct
  source 1..20: mol_type = other RNA
atggtttctgaaccagtagt

SEQ ID NO: 26052 - RNA, 20 nt, synthetic construct
  source 1..20: mol_type = other RNA
atgtactaacaaatgtctaa

SEQ ID NO: 26053 - RNA, 20 nt, synthetic construct
  source 1..20: mol_type = other RNA
atgtattcatgggtaggaac

SEQ ID NO: 26054 - RNA, 20 nt, synthetic construct
  source 1..20: mol_type = other RNA
atgtatttgtgcaagtgctg

SEQ ID NO: 26055 - RNA, 20 nt, synthetic construct
  source 1..20: mol_type = other RNA
atgtctaaaatggttagaaa

SEQ ID NO: 26056 - RNA, 20 nt, synthetic construct
  source 1..20: mol_type = other RNA
atgttcgttcagtgctaaat

SEQ ID NO: 26057 - RNA, 20 nt, synthetic construct
  source 1..20: mol_type = other RNA
atgttcttaaagatcagatt

SEQ ID NO: 26058 - RNA, 20 nt, synthetic construct
  source 1..20: mol_type = other RNA
attagtggcacctgctgaga

SEQ ID NO: 26059 - RNA, 20 nt, synthetic construct
  source 1..20: mol_type = other RNA
attataggatgctaggacag

SEQ ID NO: 26060 - RNA, 20 nt, synthetic construct
  source 1..20: mol_type = other RNA
attcagggtagtatggccat

SEQ ID NO: 26061 - RNA, 20 nt, synthetic construct
  source 1..20: mol_type = other RNA
attcatgggtaggaacagca

SEQ ID NO: 26062 - RNA, 20 nt, synthetic construct
  source 1..20: mol_type = other RNA
attccctgacaatcccaata

SEQ ID NO: 26063 - RNA, 20 nt, synthetic construct
  source 1..20: mol_type = other RNA
attctgccagccttatttct

SEQ ID NO: 26064 - RNA, 20 nt, synthetic construct
  source 1..20: mol_type = other RNA
attcttttgtaagctgctga

SEQ ID NO: 26065 - RNA, 20 nt, synthetic construct
  source 1..20: mol_type = other RNA
attgggattgtcagggaatg

SEQ ID NO: 26066 - RNA, 20 nt, synthetic construct
  source 1..20: mol_type = other RNA
attggtatctgaggctagta

SEQ ID NO: 26067 - RNA, 20 nt, synthetic construct
  source 1..20: mol_type = other RNA
attgtcagggaatgttctta

SEQ ID NO: 26068 - RNA, 20 nt, synthetic construct
  source 1..20: mol_type = other RNA
attgtttagagctacccagc

SEQ ID NO: 26069 - RNA, 20 nt, synthetic construct
  source 1..20: mol_type = other RNA
attgtttatatcagatggga

SEQ ID NO: 26070 - RNA, 20 nt, synthetic construct
  source 1..20: mol_type = other RNA
atttagcactgaacgaacat

SEQ ID NO: 26071 - RNA, 20 nt, synthetic construct
  source 1..20: mol_type = other RNA
atttctaaccattttagaca

SEQ ID NO: 26072 - RNA, 20 nt, synthetic construct
  source 1..20: mol_type = other RNA
atttgtgcaagtgctgctgc

SEQ ID NO: 26073 - RNA, 20 nt, synthetic construct
  source 1..20: mol_type = other RNA
atttgttagtacatggtatt

SEQ ID NO: 26074 - RNA, 20 nt, synthetic construct
  source 1..20: mol_type = other RNA
caaaagctagaggaagccag

SEQ ID NO: 26075 - RNA, 20 nt, synthetic construct
  source 1..20: mol_type = other RNA
caaacaaaggcctatacctt

SEQ ID NO: 26076 - RNA, 20 nt, synthetic construct
  source 1..20: mol_type = other RNA
caaagcagctttatgatatg

SEQ ID NO: 26077 - RNA, 20 nt, synthetic construct
  source 1..20: mol_type = other RNA
caaaggcctataccttcttg

SEQ ID NO: 26078 - RNA, 20 nt, synthetic construct
  source 1..20: mol_type = other RNA
caaatacatatacactctta

SEQ ID NO: 26079 - RNA, 20 nt, synthetic construct
  source 1..20: mol_type = other RNA
caaatgtctaaaatggttag

SEQ ID NO: 26080 - RNA, 20 nt, synthetic construct
  source 1..20: mol_type = other RNA
caactgcagggaaactactg

SEQ ID NO: 26081 - RNA, 20 nt, synthetic construct
  source 1..20: mol_type = other RNA
caactttcagcagcttacaa

SEQ ID NO: 26082 - RNA, 20 nt, synthetic construct
  source 1..20: mol_type = other RNA
caagaaggtataggcctttg

SEQ ID NO: 26083 - RNA, 20 nt, synthetic construct
  source 1..20: mol_type = other RNA
caagcccttcctactagcct

SEQ ID NO: 26084 - RNA, 20 nt, synthetic construct
  source 1..20: mol_type = other RNA
caagtgctgctgctgctccc

SEQ ID NO: 26085 - RNA, 20 nt, synthetic construct
  source 1..20: mol_type = other RNA
caatatgcagattgtttata

SEQ ID NO: 26086 - RNA, 20 nt, synthetic construct
  source 1..20: mol_type = other RNA
caatccagccagaaagtact

SEQ ID NO: 26087 - RNA, 20 nt, synthetic construct
  source 1..20: mol_type = other RNA
caatcccaatatgcagattg

SEQ ID NO: 26088 - RNA, 20 nt, synthetic construct
  source 1..20: mol_type = other RNA
caatctgcatattgggattg

SEQ ID NO: 26089 - RNA, 20 nt, synthetic construct
  source 1..20: mol_type = other RNA
caatgtattcatgggtagga

SEQ ID NO: 26090 - RNA, 20 nt, synthetic construct
  source 1..20: mol_type = other RNA
cacaaaagctagaggaagcc

SEQ ID NO: 26091 - RNA, 20 nt, synthetic construct
  source 1..20: mol_type = other RNA
cacaaatacatatacactct

SEQ ID NO: 26092 - RNA, 20 nt, synthetic construct
  source 1..20: mol_type = other RNA
cacaactttcagcagcttac

SEQ ID NO: 26093 - RNA, 20 nt, synthetic construct
  source 1..20: mol_type = other RNA
cacagcatggtttctgaacc

SEQ ID NO: 26094 - RNA, 20 nt, synthetic construct
  source 1..20: mol_type = other RNA
cacctgctgagatactgatg

SEQ ID NO: 26095 - RNA, 20 nt, synthetic construct
  source 1..20: mol_type = other RNA
cactaatctgatctttaaga

SEQ ID NO: 26096 - RNA, 20 nt, synthetic construct
  source 1..20: mol_type = other RNA
cactcttaacacttcttacc

SEQ ID NO: 26097 - RNA, 20 nt, synthetic construct
  source 1..20: mol_type = other RNA
cactgaacgaacatctcaag

SEQ ID NO: 26098 - RNA, 20 nt, synthetic construct
  source 1..20: mol_type = other RNA
cacttcttacctactggctt

SEQ ID NO: 26099 - RNA, 20 nt, synthetic construct
  source 1..20: mol_type = other RNA
cacttgcacaaatacatata

SEQ ID NO: 26100 - RNA, 20 nt, synthetic construct
  source 1..20: mol_type = other RNA
cagaaaccatgctgtgcatc

SEQ ID NO: 26101 - RNA, 20 nt, synthetic construct
  source 1..20: mol_type = other RNA
cagaaagtactggagaagtc

SEQ ID NO: 26102 - RNA, 20 nt, synthetic construct
  source 1..20: mol_type = other RNA
cagaataggctgctgttcct

SEQ ID NO: 26103 - RNA, 20 nt, synthetic construct
  source 1..20: mol_type = other RNA
cagataccaatccagccaga

SEQ ID NO: 26104 - RNA, 20 nt, synthetic construct
  source 1..20: mol_type = other RNA
cagatgggatgggactcatt

SEQ ID NO: 26105 - RNA, 20 nt, synthetic construct
  source 1..20: mol_type = other RNA
cagattagtggcacctgctg

SEQ ID NO: 26106 - RNA, 20 nt, synthetic construct
  source 1..20: mol_type = other RNA
cagattgtttatatcagatg

SEQ ID NO: 26107 - RNA, 20 nt, synthetic construct
  source 1..20: mol_type = other RNA
cagcacttgcacaaatacat

SEQ ID NO: 26108 - RNA, 20 nt, synthetic construct
  source 1..20: mol_type = other RNA
cagcagcacttgcacaaata

SEQ ID NO: 26109 - RNA, 20 nt, synthetic construct
  source 1..20: mol_type = other RNA
cagcagcagcacttgcacaa

SEQ ID NO: 26110 - RNA, 20 nt, synthetic construct
  source 1..20: mol_type = other RNA
cagcagcctattctgccagc

SEQ ID NO: 26111 - RNA, 20 nt, synthetic construct
  source 1..20: mol_type = other RNA
cagcagcttacaaaagaatg

SEQ ID NO: 26112 - RNA, 20 nt, synthetic construct
  source 1..20: mol_type = other RNA
cagcaggaacaagcccttcc

SEQ ID NO: 26113 - RNA, 20 nt, synthetic construct
  source 1..20: mol_type = other RNA
cagcaggacttacaaacaaa

SEQ ID NO: 26114 - RNA, 20 nt, synthetic construct
  source 1..20: mol_type = other RNA
cagcaggtgccactaatctg

SEQ ID NO: 26115 - RNA, 20 nt, synthetic construct
  source 1..20: mol_type = other RNA
cagcatggtttctgaaccag

SEQ ID NO: 26116 - RNA, 20 nt, synthetic construct
  source 1..20: mol_type = other RNA
cagccagaaagtactggaga

SEQ ID NO: 26117 - RNA, 20 nt, synthetic construct
  source 1..20: mol_type = other RNA
cagcctattctgccagcctt

SEQ ID NO: 26118 - RNA, 20 nt, synthetic construct
  source 1..20: mol_type = other RNA
cagccttatttctaaccatt

SEQ ID NO: 26119 - RNA, 20 nt, synthetic construct
  source 1..20: mol_type = other RNA
cagcttcaggtatatttagc

SEQ ID NO: 26120 - RNA, 20 nt, synthetic construct
  source 1..20: mol_type = other RNA
cagctttatgatatgactac

SEQ ID NO: 26121 - RNA, 20 nt, synthetic construct
  source 1..20: mol_type = other RNA
caggaacaagcccttcctac

SEQ ID NO: 26122 - RNA, 20 nt, synthetic construct
  source 1..20: mol_type = other RNA
caggacttacaaacaaaggc

SEQ ID NO: 26123 - RNA, 20 nt, synthetic construct
  source 1..20: mol_type = other RNA
caggattataggatgctagg

SEQ ID NO: 26124 - RNA, 20 nt, synthetic construct
  source 1..20: mol_type = other RNA
cagggaaactactggttcag

SEQ ID NO: 26125 - RNA, 20 nt, synthetic construct
  source 1..20: mol_type = other RNA
cagggaatgttcttaaagat

SEQ ID NO: 26126 - RNA, 20 nt, synthetic construct
  source 1..20: mol_type = other RNA
cagggagcagcagcagcact

SEQ ID NO: 26127 - RNA, 20 nt, synthetic construct
  source 1..20: mol_type = other RNA
cagggtagtatggccataga

SEQ ID NO: 26128 - RNA, 20 nt, synthetic construct
  source 1..20: mol_type = other RNA
caggtatatttagcactgaa

SEQ ID NO: 26129 - RNA, 20 nt, synthetic construct
  source 1..20: mol_type = other RNA
caggtgccactaatctgatc

SEQ ID NO: 26130 - RNA, 20 nt, synthetic construct
  source 1..20: mol_type = other RNA
cagtactttctggctggatt

SEQ ID NO: 26131 - RNA, 20 nt, synthetic construct
  source 1..20: mol_type = other RNA
cagtaggtaagaagtgttaa

SEQ ID NO: 26132 - RNA, 20 nt, synthetic construct
  source 1..20: mol_type = other RNA
cagtagtttccctgcagttg

SEQ ID NO: 26133 - RNA, 20 nt, synthetic construct
  source 1..20: mol_type = other RNA
cagtatctcagcaggtgcca

SEQ ID NO: 26134 - RNA, 20 nt, synthetic construct
  source 1..20: mol_type = other RNA
cagtgctaaatatacctgaa

SEQ ID NO: 26135 - RNA, 20 nt, synthetic construct
  source 1..20: mol_type = other RNA
cagttgagcagggagcagca

SEQ ID NO: 26136 - RNA, 20 nt, synthetic construct
  source 1..20: mol_type = other RNA
cataaagctgctttgatata

SEQ ID NO: 26137 - RNA, 20 nt, synthetic construct
  source 1..20: mol_type = other RNA
catacacaactttcagcagc

SEQ ID NO: 26138 - RNA, 20 nt, synthetic construct
  source 1..20: mol_type = other RNA
catactaccctgaatgagtc

SEQ ID NO: 26139 - RNA, 20 nt, synthetic construct
  source 1..20: mol_type = other RNA
catagaccttttttatatca

SEQ ID NO: 26140 - RNA, 20 nt, synthetic construct
  source 1..20: mol_type = other RNA
catatacactcttaacactt

SEQ ID NO: 26141 - RNA, 20 nt, synthetic construct
  source 1..20: mol_type = other RNA
catatcataaagctgctttg

SEQ ID NO: 26142 - RNA, 20 nt, synthetic construct
  source 1..20: mol_type = other RNA
catattgggattgtcaggga

SEQ ID NO: 26143 - RNA, 20 nt, synthetic construct
  source 1..20: mol_type = other RNA
catcagtatctcagcaggtg

SEQ ID NO: 26144 - RNA, 20 nt, synthetic construct
  source 1..20: mol_type = other RNA
catcccatctgatataaaca

SEQ ID NO: 26145 - RNA, 20 nt, synthetic construct
  source 1..20: mol_type = other RNA
catcctataatcctggactt

SEQ ID NO: 26146 - RNA, 20 nt, synthetic construct
  source 1..20: mol_type = other RNA
catctcaagaaggtataggc

SEQ ID NO: 26147 - RNA, 20 nt, synthetic construct
  source 1..20: mol_type = other RNA
catctgatataaacaatctg

SEQ ID NO: 26148 - RNA, 20 nt, synthetic construct
  source 1..20: mol_type = other RNA
catgaatacattgtttagag

SEQ ID NO: 26149 - RNA, 20 nt, synthetic construct
  source 1..20: mol_type = other RNA
catgctgtgcatcagtatct

SEQ ID NO: 26150 - RNA, 20 nt, synthetic construct
  source 1..20: mol_type = other RNA
catgggtaggaacagcagcc

SEQ ID NO: 26151 - RNA, 20 nt, synthetic construct
  source 1..20: mol_type = other RNA
catggtttctgaaccagtag

SEQ ID NO: 26152 - RNA, 20 nt, synthetic construct
  source 1..20: mol_type = other RNA
catgtactaacaaatgtcta

SEQ ID NO: 26153 - RNA, 20 nt, synthetic construct
  source 1..20: mol_type = other RNA
cattcagggtagtatggcca

SEQ ID NO: 26154 - RNA, 20 nt, synthetic construct
  source 1..20: mol_type = other RNA
cattccctgacaatcccaat

SEQ ID NO: 26155 - RNA, 20 nt, synthetic construct
  source 1..20: mol_type = other RNA
cattcttttgtaagctgctg

SEQ ID NO: 26156 - RNA, 20 nt, synthetic construct
  source 1..20: mol_type = other RNA
cattgtttagagctacccag

SEQ ID NO: 26157 - RNA, 20 nt, synthetic construct
  source 1..20: mol_type = other RNA
catttgttagtacatggtat

SEQ ID NO: 26158 - RNA, 20 nt, synthetic construct
  source 1..20: mol_type = other RNA
cattttagacatttgttagt

SEQ ID NO: 26159 - RNA, 20 nt, synthetic construct
  source 1..20: mol_type = other RNA
ccaatatgcagattgtttat

SEQ ID NO: 26160 - RNA, 20 nt, synthetic construct
  source 1..20: mol_type = other RNA
ccaatccagccagaaagtac

SEQ ID NO: 26161 - RNA, 20 nt, synthetic construct
  source 1..20: mol_type = other RNA
ccacaaaagctagaggaagc

SEQ ID NO: 26162 - RNA, 20 nt, synthetic construct
  source 1..20: mol_type = other RNA
ccactaatctgatctttaag

SEQ ID NO: 26163 - RNA, 20 nt, synthetic construct
  source 1..20: mol_type = other RNA
ccagaaagtactggagaagt

SEQ ID NO: 26164 - RNA, 20 nt, synthetic construct
  source 1..20: mol_type = other RNA
ccagcaggaacaagcccttc

SEQ ID NO: 26165 - RNA, 20 nt, synthetic construct
  source 1..20: mol_type = other RNA
ccagccagaaagtactggag

SEQ ID NO: 26166 - RNA, 20 nt, synthetic construct
  source 1..20: mol_type = other RNA
ccagccttatttctaaccat

SEQ ID NO: 26167 - RNA, 20 nt, synthetic construct
  source 1..20: mol_type = other RNA
ccaggattataggatgctag

SEQ ID NO: 26168 - RNA, 20 nt, synthetic construct
  source 1..20: mol_type = other RNA
ccagtactttctggctggat

SEQ ID NO: 26169 - RNA, 20 nt, synthetic construct
  source 1..20: mol_type = other RNA
ccagtaggtaagaagtgtta

SEQ ID NO: 26170 - RNA, 20 nt, synthetic construct
  source 1..20: mol_type = other RNA
ccagtagtttccctgcagtt

SEQ ID NO: 26171 - RNA, 20 nt, synthetic construct
  source 1..20: mol_type = other RNA
ccatactaccctgaatgagt

SEQ ID NO: 26172 - RNA, 20 nt, synthetic construct
  source 1..20: mol_type = other RNA
ccatagaccttttttatatc

SEQ ID NO: 26173 - RNA, 20 nt, synthetic construct
  source 1..20: mol_type = other RNA
ccatcccatctgatataaac

SEQ ID NO: 26174 - RNA, 20 nt, synthetic construct
  source 1..20: mol_type = other RNA
ccatctgatataaacaatct

SEQ ID NO: 26175 - RNA, 20 nt, synthetic construct
  source 1..20: mol_type = other RNA
ccatgaatacattgtttaga

SEQ ID NO: 26176 - RNA, 20 nt, synthetic construct
  source 1..20: mol_type = other RNA
ccatgctgtgcatcagtatc

SEQ ID NO: 26177 - RNA, 20 nt, synthetic construct
  source 1..20: mol_type = other RNA
ccatgtactaacaaatgtct

SEQ ID NO: 26178 - RNA, 20 nt, synthetic construct
  source 1..20: mol_type = other RNA
ccattttagacatttgttag

SEQ ID NO: 26179 - RNA, 20 nt, synthetic construct
  source 1..20: mol_type = other RNA
cccaatatgcagattgttta

SEQ ID NO: 26180 - RNA, 20 nt, synthetic construct
  source 1..20: mol_type = other RNA
cccagcaggaacaagccctt

SEQ ID NO: 26181 - RNA, 20 nt, synthetic construct
  source 1..20: mol_type = other RNA
cccatcccatctgatataaa

SEQ ID NO: 26182 - RNA, 20 nt, synthetic construct
  source 1..20: mol_type = other RNA
cccatctgatataaacaatc

SEQ ID NO: 26183 - RNA, 20 nt, synthetic construct
  source 1..20: mol_type = other RNA
cccatgaatacattgtttag

SEQ ID NO: 26184 - RNA, 20 nt, synthetic construct
  source 1..20: mol_type = other RNA
ccctgaatgagtcccatccc

SEQ ID NO: 26185 - RNA, 20 nt, synthetic construct
  source 1..20: mol_type = other RNA
ccctgacaatcccaatatgc

SEQ ID NO: 26186 - RNA, 20 nt, synthetic construct
  source 1..20: mol_type = other RNA
ccctgcagttgagcagggag

SEQ ID NO: 26187 - RNA, 20 nt, synthetic construct
  source 1..20: mol_type = other RNA
ccctgctcaactgcagggaa

SEQ ID NO: 26188 - RNA, 20 nt, synthetic construct
  source 1..20: mol_type = other RNA
cccttcctactagcctcaga

SEQ ID NO: 26189 - RNA, 20 nt, synthetic construct
  source 1..20: mol_type = other RNA
cctacccatgaatacattgt

SEQ ID NO: 26190 - RNA, 20 nt, synthetic construct
  source 1..20: mol_type = other RNA
cctactagcctcagatacca

SEQ ID NO: 26191 - RNA, 20 nt, synthetic construct
  source 1..20: mol_type = other RNA
cctactggcttcctctagct

SEQ ID NO: 26192 - RNA, 20 nt, synthetic construct
  source 1..20: mol_type = other RNA
cctagcatcctataatcctg

SEQ ID NO: 26193 - RNA, 20 nt, synthetic construct
  source 1..20: mol_type = other RNA
cctataatcctggacttctc

SEQ ID NO: 26194 - RNA, 20 nt, synthetic construct
  source 1..20: mol_type = other RNA
cctataccttcttgagatgt

SEQ ID NO: 26195 - RNA, 20 nt, synthetic construct
  source 1..20: mol_type = other RNA
cctattctgccagccttatt

SEQ ID NO: 26196 - RNA, 20 nt, synthetic construct
  source 1..20: mol_type = other RNA
cctcagataccaatccagcc

SEQ ID NO: 26197 - RNA, 20 nt, synthetic construct
  source 1..20: mol_type = other RNA
cctctagcttttgtggcagc

SEQ ID NO: 26198 - RNA, 20 nt, synthetic construct
  source 1..20: mol_type = other RNA
cctgaagctgccacaaaagc

SEQ ID NO: 26199 - RNA, 20 nt, synthetic construct
  source 1..20: mol_type = other RNA
cctgaatgagtcccatccca

SEQ ID NO: 26200 - RNA, 20 nt, synthetic construct
  source 1..20: mol_type = other RNA
cctgacaatcccaatatgca

SEQ ID NO: 26201 - RNA, 20 nt, synthetic construct
  source 1..20: mol_type = other RNA
cctgcagttgagcagggagc

SEQ ID NO: 26202 - RNA, 20 nt, synthetic construct
  source 1..20: mol_type = other RNA
cctgctcaactgcagggaaa

SEQ ID NO: 26203 - RNA, 20 nt, synthetic construct
  source 1..20: mol_type = other RNA
cctgctgagatactgatgca

SEQ ID NO: 26204 - RNA, 20 nt, synthetic construct
  source 1..20: mol_type = other RNA
cctgctgggtagctctaaac

SEQ ID NO: 26205 - RNA, 20 nt, synthetic construct
  source 1..20: mol_type = other RNA
cctgctgtcctagcatccta

SEQ ID NO: 26206 - RNA, 20 nt, synthetic construct
  source 1..20: mol_type = other RNA
cctggacttctccagtactt

SEQ ID NO: 26207 - RNA, 20 nt, synthetic construct
  source 1..20: mol_type = other RNA
ccttatttctaaccatttta

SEQ ID NO: 26208 - RNA, 20 nt, synthetic construct
  source 1..20: mol_type = other RNA
ccttcctactagcctcagat

SEQ ID NO: 26209 - RNA, 20 nt, synthetic construct
  source 1..20: mol_type = other RNA
ccttcttgagatgttcgttc

SEQ ID NO: 26210 - RNA, 20 nt, synthetic construct
  source 1..20: mol_type = other RNA
cctttgtttgtaagtcctgc

SEQ ID NO: 26211 - RNA, 20 nt, synthetic construct
  source 1..20: mol_type = other RNA
ccttttttatatcaaagcag

SEQ ID NO: 26212 - RNA, 20 nt, synthetic construct
  source 1..20: mol_type = other RNA
cgaacatctcaagaaggtat

SEQ ID NO: 26213 - RNA, 20 nt, synthetic construct
  source 1..20: mol_type = other RNA
cgttcagtgctaaatatacc

SEQ ID NO: 26214 - RNA, 20 nt, synthetic construct
  source 1..20: mol_type = other RNA
ctaaaatggttagaaataag

SEQ ID NO: 26215 - RNA, 20 nt, synthetic construct
  source 1..20: mol_type = other RNA
ctaaacaatgtattcatggg

SEQ ID NO: 26216 - RNA, 20 nt, synthetic construct
  source 1..20: mol_type = other RNA
ctaaatatacctgaagctgc

SEQ ID NO: 26217 - RNA, 20 nt, synthetic construct
  source 1..20: mol_type = other RNA
ctaacaaatgtctaaaatgg

SEQ ID NO: 26218 - RNA, 20 nt, synthetic construct
  source 1..20: mol_type = other RNA
ctaaccattttagacatttg

SEQ ID NO: 26219 - RNA, 20 nt, synthetic construct
  source 1..20: mol_type = other RNA
ctaatctgatctttaagaac

SEQ ID NO: 26220 - RNA, 20 nt, synthetic construct
  source 1..20: mol_type = other RNA
ctacccagcaggaacaagcc

SEQ ID NO: 26221 - RNA, 20 nt, synthetic construct
  source 1..20: mol_type = other RNA
ctacccatgaatacattgtt

SEQ ID NO: 26222 - RNA, 20 nt, synthetic construct
  source 1..20: mol_type = other RNA
ctaccctgaatgagtcccat

SEQ ID NO: 26223 - RNA, 20 nt, synthetic construct
  source 1..20: mol_type = other RNA
ctactagcctcagataccaa

SEQ ID NO: 26224 - RNA, 20 nt, synthetic construct
  source 1..20: mol_type = other RNA
ctactcatacacaactttca

SEQ ID NO: 26225 - RNA, 20 nt, synthetic construct
  source 1..20: mol_type = other RNA
ctactggcttcctctagctt

SEQ ID NO: 26226 - RNA, 20 nt, synthetic construct
  source 1..20: mol_type = other RNA
ctactggttcagaaaccatg

SEQ ID NO: 26227 - RNA, 20 nt, synthetic construct
  source 1..20: mol_type = other RNA
ctagaggaagccagtaggta

SEQ ID NO: 26228 - RNA, 20 nt, synthetic construct
  source 1..20: mol_type = other RNA
ctagcatcctataatcctgg

SEQ ID NO: 26229 - RNA, 20 nt, synthetic construct
  source 1..20: mol_type = other RNA
ctagcctcagataccaatcc

SEQ ID NO: 26230 - RNA, 20 nt, synthetic construct
  source 1..20: mol_type = other RNA
ctagcttttgtggcagcttc

SEQ ID NO: 26231 - RNA, 20 nt, synthetic construct
  source 1..20: mol_type = other RNA
ctaggacagcaggacttaca

SEQ ID NO: 26232 - RNA, 20 nt, synthetic construct
  source 1..20: mol_type = other RNA
ctagtaggaagggcttgttc

SEQ ID NO: 26233 - RNA, 20 nt, synthetic construct
  source 1..20: mol_type = other RNA
ctataatcctggacttctcc

SEQ ID NO: 26234 - RNA, 20 nt, synthetic construct
  source 1..20: mol_type = other RNA
ctataccttcttgagatgtt

SEQ ID NO: 26235 - RNA, 20 nt, synthetic construct
  source 1..20: mol_type = other RNA
ctatgaaaaagacagtggag

SEQ ID NO: 26236 - RNA, 20 nt, synthetic construct
  source 1..20: mol_type = other RNA
ctatggccatactaccctga

SEQ ID NO: 26237 - RNA, 20 nt, synthetic construct
  source 1..20: mol_type = other RNA
ctattctgccagccttattt

SEQ ID NO: 26238 - RNA, 20 nt, synthetic construct
  source 1..20: mol_type = other RNA
ctcaactgcagggaaactac

SEQ ID NO: 26239 - RNA, 20 nt, synthetic construct
  source 1..20: mol_type = other RNA
ctcaagaaggtataggcctt

SEQ ID NO: 26240 - RNA, 20 nt, synthetic construct
  source 1..20: mol_type = other RNA
ctcagataccaatccagcca

SEQ ID NO: 26241 - RNA, 20 nt, synthetic construct
  source 1..20: mol_type = other RNA
ctcagcaggtgccactaatc

SEQ ID NO: 26242 - RNA, 20 nt, synthetic construct
  source 1..20: mol_type = other RNA
ctcatacacaactttcagca

SEQ ID NO: 26243 - RNA, 20 nt, synthetic construct
  source 1..20: mol_type = other RNA
ctcattcagggtagtatggc

SEQ ID NO: 26244 - RNA, 20 nt, synthetic construct
  source 1..20: mol_type = other RNA
ctccagtactttctggctgg

SEQ ID NO: 26245 - RNA, 20 nt, synthetic construct
  source 1..20: mol_type = other RNA
ctccctgctcaactgcaggg

SEQ ID NO: 26246 - RNA, 20 nt, synthetic construct
  source 1..20: mol_type = other RNA
ctctaaacaatgtattcatg

SEQ ID NO: 26247 - RNA, 20 nt, synthetic construct
  source 1..20: mol_type = other RNA
ctctagcttttgtggcagct

SEQ ID NO: 26248 - RNA, 20 nt, synthetic construct
  source 1..20: mol_type = other RNA
ctcttaacacttcttaccta

SEQ ID NO: 26249 - RNA, 20 nt, synthetic construct
  source 1..20: mol_type = other RNA
ctgaaagttgtgtatgagta

SEQ ID NO: 26250 - RNA, 20 nt, synthetic construct
  source 1..20: mol_type = other RNA
ctgaaccagtagtttccctg

SEQ ID NO: 26251 - RNA, 20 nt, synthetic construct
  source 1..20: mol_type = other RNA
ctgaacgaacatctcaagaa

SEQ ID NO: 26252 - RNA, 20 nt, synthetic construct
  source 1..20: mol_type = other RNA
ctgaagctgccacaaaagct

SEQ ID NO: 26253 - RNA, 20 nt, synthetic construct
  source 1..20: mol_type = other RNA
ctgaatgagtcccatcccat

SEQ ID NO: 26254 - RNA, 20 nt, synthetic construct
  source 1..20: mol_type = other RNA
ctgacaatcccaatatgcag

SEQ ID NO: 26255 - RNA, 20 nt, synthetic construct
  source 1..20: mol_type = other RNA
ctgagatactgatgcacagc

SEQ ID NO: 26256 - RNA, 20 nt, synthetic construct
  source 1..20: mol_type = other RNA
ctgaggctagtaggaagggc

SEQ ID NO: 26257 - RNA, 20 nt, synthetic construct
  source 1..20: mol_type = other RNA
ctgatataaacaatctgcat

SEQ ID NO: 26258 - RNA, 20 nt, synthetic construct
  source 1..20: mol_type = other RNA
ctgatctttaagaacattcc

SEQ ID NO: 26259 - RNA, 20 nt, synthetic construct
  source 1..20: mol_type = other RNA
ctgatgcacagcatggtttc

SEQ ID NO: 26260 - RNA, 20 nt, synthetic construct
  source 1..20: mol_type = other RNA
ctgcagggaaactactggtt

SEQ ID NO: 26261 - RNA, 20 nt, synthetic construct
  source 1..20: mol_type = other RNA
ctgcagttgagcagggagca

SEQ ID NO: 26262 - RNA, 20 nt, synthetic construct
  source 1..20: mol_type = other RNA
ctgcatattgggattgtcag

SEQ ID NO: 26263 - RNA, 20 nt, synthetic construct
  source 1..20: mol_type = other RNA
ctgccacaaaagctagagga

SEQ ID NO: 26264 - RNA, 20 nt, synthetic construct
  source 1..20: mol_type = other RNA
ctgccagccttatttctaac

SEQ ID NO: 26265 - RNA, 20 nt, synthetic construct
  source 1..20: mol_type = other RNA
ctgctcaactgcagggaaac

SEQ ID NO: 26266 - RNA, 20 nt, synthetic construct
  source 1..20: mol_type = other RNA
ctgctccctgctcaactgca

SEQ ID NO: 26267 - RNA, 20 nt, synthetic construct
  source 1..20: mol_type = other RNA
ctgctgaaagttgtgtatga

SEQ ID NO: 26268 - RNA, 20 nt, synthetic construct
  source 1..20: mol_type = other RNA
ctgctgagatactgatgcac

SEQ ID NO: 26269 - RNA, 20 nt, synthetic construct
  source 1..20: mol_type = other RNA
ctgctgctccctgctcaact

SEQ ID NO: 26270 - RNA, 20 nt, synthetic construct
  source 1..20: mol_type = other RNA
ctgctgctgctccctgctca

SEQ ID NO: 26271 - RNA, 20 nt, synthetic construct
  source 1..20: mol_type = other RNA
ctgctgggtagctctaaaca

SEQ ID NO: 26272 - RNA, 20 nt, synthetic construct
  source 1..20: mol_type = other RNA
ctgctgtcctagcatcctat

SEQ ID NO: 26273 - RNA, 20 nt, synthetic construct
  source 1..20: mol_type = other RNA
ctgctgttcctacccatgaa

SEQ ID NO: 26274 - RNA, 20 nt, synthetic construct
  source 1..20: mol_type = other RNA
ctgctttgatataaaaaagg

SEQ ID NO: 26275 - RNA, 20 nt, synthetic construct
  source 1..20: mol_type = other RNA
ctggacttctccagtacttt

SEQ ID NO: 26276 - RNA, 20 nt, synthetic construct
  source 1..20: mol_type = other RNA
ctggagaagtccaggattat

SEQ ID NO: 26277 - RNA, 20 nt, synthetic construct
  source 1..20: mol_type = other RNA
ctggattggtatctgaggct

SEQ ID NO: 26278 - RNA, 20 nt, synthetic construct
  source 1..20: mol_type = other RNA
ctggcagaataggctgctgt

SEQ ID NO: 26279 - RNA, 20 nt, synthetic construct
  source 1..20: mol_type = other RNA
ctggctggattggtatctga

SEQ ID NO: 26280 - RNA, 20 nt, synthetic construct
  source 1..20: mol_type = other RNA
ctggcttcctctagcttttg

SEQ ID NO: 26281 - RNA, 20 nt, synthetic construct
  source 1..20: mol_type = other RNA
ctgggtagctctaaacaatg

SEQ ID NO: 26282 - RNA, 20 nt, synthetic construct
  source 1..20: mol_type = other RNA
ctggttcagaaaccatgctg

SEQ ID NO: 26283 - RNA, 20 nt, synthetic construct
  source 1..20: mol_type = other RNA
ctgtcctagcatcctataat

SEQ ID NO: 26284 - RNA, 20 nt, synthetic construct
  source 1..20: mol_type = other RNA
ctgtgcatcagtatctcagc

SEQ ID NO: 26285 - RNA, 20 nt, synthetic construct
  source 1..20: mol_type = other RNA
ctgttcctacccatgaatac

SEQ ID NO: 26286 - RNA, 20 nt, synthetic construct
  source 1..20: mol_type = other RNA
cttaaagatcagattagtgg

SEQ ID NO: 26287 - RNA, 20 nt, synthetic construct
  source 1..20: mol_type = other RNA
cttaacacttcttacctact

SEQ ID NO: 26288 - RNA, 20 nt, synthetic construct
  source 1..20: mol_type = other RNA
cttacaaacaaaggcctata

SEQ ID NO: 26289 - RNA, 20 nt, synthetic construct
  source 1..20: mol_type = other RNA
cttacattcttttgtaagct

SEQ ID NO: 26290 - RNA, 20 nt, synthetic construct
  source 1..20: mol_type = other RNA
cttacctactggcttcctct

SEQ ID NO: 26291 - RNA, 20 nt, synthetic construct
  source 1..20: mol_type = other RNA
cttatttctaaccattttag

SEQ ID NO: 26292 - RNA, 20 nt, synthetic construct
  source 1..20: mol_type = other RNA
cttcaggtatatttagcact

SEQ ID NO: 26293 - RNA, 20 nt, synthetic construct
  source 1..20: mol_type = other RNA
cttcctactagcctcagata

SEQ ID NO: 26294 - RNA, 20 nt, synthetic construct
  source 1..20: mol_type = other RNA
cttcctctagcttttgtggc

SEQ ID NO: 26295 - RNA, 20 nt, synthetic construct
  source 1..20: mol_type = other RNA
cttctccagtactttctggc

SEQ ID NO: 26296 - RNA, 20 nt, synthetic construct
  source 1..20: mol_type = other RNA
cttcttacctactggcttcc

SEQ ID NO: 26297 - RNA, 20 nt, synthetic construct
  source 1..20: mol_type = other RNA
cttcttgagatgttcgttca

SEQ ID NO: 26298 - RNA, 20 nt, synthetic construct
  source 1..20: mol_type = other RNA
cttgagatgttcgttcagtg

SEQ ID NO: 26299 - RNA, 20 nt, synthetic construct
  source 1..20: mol_type = other RNA
cttgcacaaatacatataca

SEQ ID NO: 26300 - RNA, 20 nt, synthetic construct
  source 1..20: mol_type = other RNA
cttgttcctgctgggtagct

SEQ ID NO: 26301 - RNA, 20 nt, synthetic construct
  source 1..20: mol_type = other RNA
ctttaagaacattccctgac

SEQ ID NO: 26302 - RNA, 20 nt, synthetic construct
  source 1..20: mol_type = other RNA
ctttatgatatgactactca

SEQ ID NO: 26303 - RNA, 20 nt, synthetic construct
  source 1..20: mol_type = other RNA
ctttcagcagcttacaaaag

SEQ ID NO: 26304 - RNA, 20 nt, synthetic construct
  source 1..20: mol_type = other RNA
ctttctggctggattggtat

SEQ ID NO: 26305 - RNA, 20 nt, synthetic construct
  source 1..20: mol_type = other RNA
ctttgatataaaaaaggtct

SEQ ID NO: 26306 - RNA, 20 nt, synthetic construct
  source 1..20: mol_type = other RNA
ctttgtttgtaagtcctgct

SEQ ID NO: 26307 - RNA, 20 nt, synthetic construct
  source 1..20: mol_type = other RNA
cttttaaaataccatgtact

SEQ ID NO: 26308 - RNA, 20 nt, synthetic construct
  source 1..20: mol_type = other RNA
cttttgtaagctgctgaaag

SEQ ID NO: 26309 - RNA, 20 nt, synthetic construct
  source 1..20: mol_type = other RNA
cttttgtggcagcttcaggt

SEQ ID NO: 26310 - RNA, 20 nt, synthetic construct
  source 1..20: mol_type = other RNA
cttttttatatcaaagcagc

SEQ ID NO: 26311 - RNA, 20 nt, synthetic construct
  source 1..20: mol_type = other RNA
gaaaaagacagtggagaaaa

SEQ ID NO: 26312 - RNA, 20 nt, synthetic construct
  source 1..20: mol_type = other RNA
gaaaccatgctgtgcatcag

SEQ ID NO: 26313 - RNA, 20 nt, synthetic construct
  source 1..20: mol_type = other RNA
gaaactactggttcagaaac

SEQ ID NO: 26314 - RNA, 20 nt, synthetic construct
  source 1..20: mol_type = other RNA
gaaagtactggagaagtcca

SEQ ID NO: 26315 - RNA, 20 nt, synthetic construct
  source 1..20: mol_type = other RNA
gaaagttgtgtatgagtagt

SEQ ID NO: 26316 - RNA, 20 nt, synthetic construct
  source 1..20: mol_type = other RNA
gaaataaggctggcagaata

SEQ ID NO: 26317 - RNA, 20 nt, synthetic construct
  source 1..20: mol_type = other RNA
gaacaagcccttcctactag

SEQ ID NO: 26318 - RNA, 20 nt, synthetic construct
  source 1..20: mol_type = other RNA
gaacagcagcctattctgcc

SEQ ID NO: 26319 - RNA, 20 nt, synthetic construct
  source 1..20: mol_type = other RNA
gaacatctcaagaaggtata

SEQ ID NO: 26320 - RNA, 20 nt, synthetic construct
  source 1..20: mol_type = other RNA
gaacattccctgacaatccc

SEQ ID NO: 26321 - RNA, 20 nt, synthetic construct
  source 1..20: mol_type = other RNA
gaaccagtagtttccctgca

SEQ ID NO: 26322 - RNA, 20 nt, synthetic construct
  source 1..20: mol_type = other RNA
gaacgaacatctcaagaagg

SEQ ID NO: 26323 - RNA, 20 nt, synthetic construct
  source 1..20: mol_type = other RNA
gaagacattaagttttactt

SEQ ID NO: 26324 - RNA, 20 nt, synthetic construct
  source 1..20: mol_type = other RNA
gaagccagtaggtaagaagt

SEQ ID NO: 26325 - RNA, 20 nt, synthetic construct
  source 1..20: mol_type = other RNA
gaagctgccacaaaagctag

SEQ ID NO: 26326 - RNA, 20 nt, synthetic construct
  source 1..20: mol_type = other RNA
gaagggcttgttcctgctgg

SEQ ID NO: 26327 - RNA, 20 nt, synthetic construct
  source 1..20: mol_type = other RNA
gaaggtataggcctttgttt

SEQ ID NO: 26328 - RNA, 20 nt, synthetic construct
  source 1..20: mol_type = other RNA
gaagtccaggattataggat

SEQ ID NO: 26329 - RNA, 20 nt, synthetic construct
  source 1..20: mol_type = other RNA
gaagtgttaagagtgtatat

SEQ ID NO: 26330 - RNA, 20 nt, synthetic construct
  source 1..20: mol_type = other RNA
gaatacattgtttagagcta

SEQ ID NO: 26331 - RNA, 20 nt, synthetic construct
  source 1..20: mol_type = other RNA
gaataggctgctgttcctac

SEQ ID NO: 26332 - RNA, 20 nt, synthetic construct
  source 1..20: mol_type = other RNA
gaatgagtcccatcccatct

SEQ ID NO: 26333 - RNA, 20 nt, synthetic construct
  source 1..20: mol_type = other RNA
gaatgttcttaaagatcaga

SEQ ID NO: 26334 - RNA, 20 nt, synthetic construct
  source 1..20: mol_type = other RNA
gacaatcccaatatgcagat

SEQ ID NO: 26335 - RNA, 20 nt, synthetic construct
  source 1..20: mol_type = other RNA
gacagcaggacttacaaaca

SEQ ID NO: 26336 - RNA, 20 nt, synthetic construct
  source 1..20: mol_type = other RNA
gacatttgttagtacatggt

SEQ ID NO: 26337 - RNA, 20 nt, synthetic construct
  source 1..20: mol_type = other RNA
gaccttttttatatcaaagc

SEQ ID NO: 26338 - RNA, 20 nt, synthetic construct
  source 1..20: mol_type = other RNA
gactactcatacacaacttt

SEQ ID NO: 26339 - RNA, 20 nt, synthetic construct
  source 1..20: mol_type = other RNA
gactcattcagggtagtatg

SEQ ID NO: 26340 - RNA, 20 nt, synthetic construct
  source 1..20: mol_type = other RNA
gacttacaaacaaaggccta

SEQ ID NO: 26341 - RNA, 20 nt, synthetic construct
  source 1..20: mol_type = other RNA
gacttctccagtactttctg

SEQ ID NO: 26342 - RNA, 20 nt, synthetic construct
  source 1..20: mol_type = other RNA
gagaagtccaggattatagg

SEQ ID NO: 26343 - RNA, 20 nt, synthetic construct
  source 1..20: mol_type = other RNA
gagatactgatgcacagcat

SEQ ID NO: 26344 - RNA, 20 nt, synthetic construct
  source 1..20: mol_type = other RNA
gagatgttcgttcagtgcta

SEQ ID NO: 26345 - RNA, 20 nt, synthetic construct
  source 1..20: mol_type = other RNA
gagcagcagcagcacttgca

SEQ ID NO: 26346 - RNA, 20 nt, synthetic construct
  source 1..20: mol_type = other RNA
gagcagggagcagcagcagc

SEQ ID NO: 26347 - RNA, 20 nt, synthetic construct
  source 1..20: mol_type = other RNA
gagctacccagcaggaacaa

SEQ ID NO: 26348 - RNA, 20 nt, synthetic construct
  source 1..20: mol_type = other RNA
gaggaagccagtaggtaaga

SEQ ID NO: 26349 - RNA, 20 nt, synthetic construct
  source 1..20: mol_type = other RNA
gaggctagtaggaagggctt

SEQ ID NO: 26350 - RNA, 20 nt, synthetic construct
  source 1..20: mol_type = other RNA
gagtagtcatatcataaagc

SEQ ID NO: 26351 - RNA, 20 nt, synthetic construct
  source 1..20: mol_type = other RNA
gagtcccatcccatctgata

SEQ ID NO: 26352 - RNA, 20 nt, synthetic construct
  source 1..20: mol_type = other RNA
gagtgtatatgtatttgtgc

SEQ ID NO: 26353 - RNA, 20 nt, synthetic construct
  source 1..20: mol_type = other RNA
gataccaatccagccagaaa

SEQ ID NO: 26354 - RNA, 20 nt, synthetic construct
  source 1..20: mol_type = other RNA
gatactgatgcacagcatgg

SEQ ID NO: 26355 - RNA, 20 nt, synthetic construct
  source 1..20: mol_type = other RNA
gatataaaaaaggtctatgg

SEQ ID NO: 26356 - RNA, 20 nt, synthetic construct
  source 1..20: mol_type = other RNA
gatataaacaatctgcatat

SEQ ID NO: 26357 - RNA, 20 nt, synthetic construct
  source 1..20: mol_type = other RNA
gatatgactactcatacaca

SEQ ID NO: 26358 - RNA, 20 nt, synthetic construct
  source 1..20: mol_type = other RNA
gatcagattagtggcacctg

SEQ ID NO: 26359 - RNA, 20 nt, synthetic construct
  source 1..20: mol_type = other RNA
gatctttaagaacattccct

SEQ ID NO: 26360 - RNA, 20 nt, synthetic construct
  source 1..20: mol_type = other RNA
gatgcacagcatggtttctg

SEQ ID NO: 26361 - RNA, 20 nt, synthetic construct
  source 1..20: mol_type = other RNA
gatgctaggacagcaggact

SEQ ID NO: 26362 - RNA, 20 nt, synthetic construct
  source 1..20: mol_type = other RNA
gatgggactcattcagggta

SEQ ID NO: 26363 - RNA, 20 nt, synthetic construct
  source 1..20: mol_type = other RNA
gatgggatgggactcattca

SEQ ID NO: 26364 - RNA, 20 nt, synthetic construct
  source 1..20: mol_type = other RNA
gatgttcgttcagtgctaaa

SEQ ID NO: 26365 - RNA, 20 nt, synthetic construct
  source 1..20: mol_type = other RNA
gattagtggcacctgctgag

SEQ ID NO: 26366 - RNA, 20 nt, synthetic construct
  source 1..20: mol_type = other RNA
gattataggatgctaggaca

SEQ ID NO: 26367 - RNA, 20 nt, synthetic construct
  source 1..20: mol_type = other RNA
gattggtatctgaggctagt

SEQ ID NO: 26368 - RNA, 20 nt, synthetic construct
  source 1..20: mol_type = other RNA
gattgtcagggaatgttctt

SEQ ID NO: 26369 - RNA, 20 nt, synthetic construct
  source 1..20: mol_type = other RNA
gattgtttatatcagatggg

SEQ ID NO: 26370 - RNA, 20 nt, synthetic construct
  source 1..20: mol_type = other RNA
gcaagtgctgctgctgctcc

SEQ ID NO: 26371 - RNA, 20 nt, synthetic construct
  source 1..20: mol_type = other RNA
gcacaaatacatatacactc

SEQ ID NO: 26372 - RNA, 20 nt, synthetic construct
  source 1..20: mol_type = other RNA
gcacagcatggtttctgaac

SEQ ID NO: 26373 - RNA, 20 nt, synthetic construct
  source 1..20: mol_type = other RNA
gcacctgctgagatactgat

SEQ ID NO: 26374 - RNA, 20 nt, synthetic construct
  source 1..20: mol_type = other RNA
gcactgaacgaacatctcaa

SEQ ID NO: 26375 - RNA, 20 nt, synthetic construct
  source 1..20: mol_type = other RNA
gcacttgcacaaatacatat

SEQ ID NO: 26376 - RNA, 20 nt, synthetic construct
  source 1..20: mol_type = other RNA
gcagaataggctgctgttcc

SEQ ID NO: 26377 - RNA, 20 nt, synthetic construct
  source 1..20: mol_type = other RNA
gcagattgtttatatcagat

SEQ ID NO: 26378 - RNA, 20 nt, synthetic construct
  source 1..20: mol_type = other RNA
gcagcacttgcacaaataca

SEQ ID NO: 26379 - RNA, 20 nt, synthetic construct
  source 1..20: mol_type = other RNA
gcagcagcacttgcacaaat

SEQ ID NO: 26380 - RNA, 20 nt, synthetic construct
  source 1..20: mol_type = other RNA
gcagcagcagcacttgcaca

SEQ ID NO: 26381 - RNA, 20 nt, synthetic construct
  source 1..20: mol_type = other RNA
gcagcctattctgccagcct

SEQ ID NO: 26382 - RNA, 20 nt, synthetic construct
  source 1..20: mol_type = other RNA
gcagcttacaaaagaatgta

SEQ ID NO: 26383 - RNA, 20 nt, synthetic construct
  source 1..20: mol_type = other RNA
gcagcttcaggtatatttag

SEQ ID NO: 26384 - RNA, 20 nt, synthetic construct
  source 1..20: mol_type = other RNA
gcagctttatgatatgacta

SEQ ID NO: 26385 - RNA, 20 nt, synthetic construct
  source 1..20: mol_type = other RNA
gcaggaacaagcccttccta

SEQ ID NO: 26386 - RNA, 20 nt, synthetic construct
  source 1..20: mol_type = other RNA
gcaggacttacaaacaaagg

SEQ ID NO: 26387 - RNA, 20 nt, synthetic construct
  source 1..20: mol_type = other RNA
gcagggaaactactggttca

SEQ ID NO: 26388 - RNA, 20 nt, synthetic construct
  source 1..20: mol_type = other RNA
gcagggagcagcagcagcac

SEQ ID NO: 26389 - RNA, 20 nt, synthetic construct
  source 1..20: mol_type = other RNA
gcaggtgccactaatctgat

SEQ ID NO: 26390 - RNA, 20 nt, synthetic construct
  source 1..20: mol_type = other RNA
gcagttgagcagggagcagc

SEQ ID NO: 26391 - RNA, 20 nt, synthetic construct
  source 1..20: mol_type = other RNA
gcatattgggattgtcaggg

SEQ ID NO: 26392 - RNA, 20 nt, synthetic construct
  source 1..20: mol_type = other RNA
gcatcagtatctcagcaggt

SEQ ID NO: 26393 - RNA, 20 nt, synthetic construct
  source 1..20: mol_type = other RNA
gcatcctataatcctggact

SEQ ID NO: 26394 - RNA, 20 nt, synthetic construct
  source 1..20: mol_type = other RNA
gcatggtttctgaaccagta

SEQ ID NO: 26395 - RNA, 20 nt, synthetic construct
  source 1..20: mol_type = other RNA
gccacaaaagctagaggaag

SEQ ID NO: 26396 - RNA, 20 nt, synthetic construct
  source 1..20: mol_type = other RNA
gccactaatctgatctttaa

SEQ ID NO: 26397 - RNA, 20 nt, synthetic construct
  source 1..20: mol_type = other RNA
gccagaaagtactggagaag

SEQ ID NO: 26398 - RNA, 20 nt, synthetic construct
  source 1..20: mol_type = other RNA
gccagccttatttctaacca

SEQ ID NO: 26399 - RNA, 20 nt, synthetic construct
  source 1..20: mol_type = other RNA
gccagtaggtaagaagtgtt

SEQ ID NO: 26400 - RNA, 20 nt, synthetic construct
  source 1..20: mol_type = other RNA
gccatactaccctgaatgag

SEQ ID NO: 26401 - RNA, 20 nt, synthetic construct
  source 1..20: mol_type = other RNA
gccatagaccttttttatat

SEQ ID NO: 26402 - RNA, 20 nt, synthetic construct
  source 1..20: mol_type = other RNA
gcccttcctactagcctcag

SEQ ID NO: 26403 - RNA, 20 nt, synthetic construct
  source 1..20: mol_type = other RNA
gcctataccttcttgagatg

SEQ ID NO: 26404 - RNA, 20 nt, synthetic construct
  source 1..20: mol_type = other RNA
gcctattctgccagccttat

SEQ ID NO: 26405 - RNA, 20 nt, synthetic construct
  source 1..20: mol_type = other RNA
gcctcagataccaatccagc

SEQ ID NO: 26406 - RNA, 20 nt, synthetic construct
  source 1..20: mol_type = other RNA
gccttatttctaaccatttt

SEQ ID NO: 26407 - RNA, 20 nt, synthetic construct
  source 1..20: mol_type = other RNA
gcctttgtttgtaagtcctg

SEQ ID NO: 26408 - RNA, 20 nt, synthetic construct
  source 1..20: mol_type = other RNA
gctaaatatacctgaagctg

SEQ ID NO: 26409 - RNA, 20 nt, synthetic construct
  source 1..20: mol_type = other RNA
gctacccagcaggaacaagc

SEQ ID NO: 26410 - RNA, 20 nt, synthetic construct
  source 1..20: mol_type = other RNA
gctagaggaagccagtaggt

SEQ ID NO: 26411 - RNA, 20 nt, synthetic construct
  source 1..20: mol_type = other RNA
gctaggacagcaggacttac

SEQ ID NO: 26412 - RNA, 20 nt, synthetic construct
  source 1..20: mol_type = other RNA
gctagtaggaagggcttgtt

SEQ ID NO: 26413 - RNA, 20 nt, synthetic construct
  source 1..20: mol_type = other RNA
gctcaactgcagggaaacta

SEQ ID NO: 26414 - RNA, 20 nt, synthetic construct
  source 1..20: mol_type = other RNA
gctccctgctcaactgcagg

SEQ ID NO: 26415 - RNA, 20 nt, synthetic construct
  source 1..20: mol_type = other RNA
gctctaaacaatgtattcat

SEQ ID NO: 26416 - RNA, 20 nt, synthetic construct
  source 1..20: mol_type = other RNA
gctgaaagttgtgtatgagt

SEQ ID NO: 26417 - RNA, 20 nt, synthetic construct
  source 1..20: mol_type = other RNA
gctgagatactgatgcacag

SEQ ID NO: 26418 - RNA, 20 nt, synthetic construct
  source 1..20: mol_type = other RNA
gctgccacaaaagctagagg

SEQ ID NO: 26419 - RNA, 20 nt, synthetic construct
  source 1..20: mol_type = other RNA
gctgctccctgctcaactgc

SEQ ID NO: 26420 - RNA, 20 nt, synthetic construct
  source 1..20: mol_type = other RNA
gctgctgaaagttgtgtatg

SEQ ID NO: 26421 - RNA, 20 nt, synthetic construct
  source 1..20: mol_type = other RNA
gctgctgctccctgctcaac

SEQ ID NO: 26422 - RNA, 20 nt, synthetic construct
  source 1..20: mol_type = other RNA
gctgctgctgctccctgctc

SEQ ID NO: 26423 - RNA, 20 nt, synthetic construct
  source 1..20: mol_type = other RNA
gctgctgttcctacccatga

SEQ ID NO: 26424 - RNA, 20 nt, synthetic construct
  source 1..20: mol_type = other RNA
gctgctttgatataaaaaag

SEQ ID NO: 26425 - RNA, 20 nt, synthetic construct
  source 1..20: mol_type = other RNA
gctggattggtatctgaggc

SEQ ID NO: 26426 - RNA, 20 nt, synthetic construct
  source 1..20: mol_type = other RNA
gctggcagaataggctgctg

SEQ ID NO: 26427 - RNA, 20 nt, synthetic construct
  source 1..20: mol_type = other RNA
gctgggtagctctaaacaat

SEQ ID NO: 26428 - RNA, 20 nt, synthetic construct
  source 1..20: mol_type = other RNA
gctgtcctagcatcctataa

SEQ ID NO: 26429 - RNA, 20 nt, synthetic construct
  source 1..20: mol_type = other RNA
gctgtgcatcagtatctcag

SEQ ID NO: 26430 - RNA, 20 nt, synthetic construct
  source 1..20: mol_type = other RNA
gctgttcctacccatgaata

SEQ ID NO: 26431 - RNA, 20 nt, synthetic construct
  source 1..20: mol_type = other RNA
gcttcaggtatatttagcac

SEQ ID NO: 26432 - RNA, 20 nt, synthetic construct
  source 1..20: mol_type = other RNA
gcttcctctagcttttgtgg

SEQ ID NO: 26433 - RNA, 20 nt, synthetic construct
  source 1..20: mol_type = other RNA
gcttgttcctgctgggtagc

SEQ ID NO: 26434 - RNA, 20 nt, synthetic construct
  source 1..20: mol_type = other RNA
gctttatgatatgactactc

SEQ ID NO: 26435 - RNA, 20 nt, synthetic construct
  source 1..20: mol_type = other RNA
gctttgatataaaaaaggtc

SEQ ID NO: 26436 - RNA, 20 nt, synthetic construct
  source 1..20: mol_type = other RNA
gcttttgtggcagcttcagg

SEQ ID NO: 26437 - RNA, 20 nt, synthetic construct
  source 1..20: mol_type = other RNA
ggaaactactggttcagaaa

SEQ ID NO: 26438 - RNA, 20 nt, synthetic construct
  source 1..20: mol_type = other RNA
ggaacaagcccttcctacta

SEQ ID NO: 26439 - RNA, 20 nt, synthetic construct
  source 1..20: mol_type = other RNA
ggaacagcagcctattctgc

SEQ ID NO: 26440 - RNA, 20 nt, synthetic construct
  source 1..20: mol_type = other RNA
ggaagacattaagttttact

SEQ ID NO: 26441 - RNA, 20 nt, synthetic construct
  source 1..20: mol_type = other RNA
ggaagccagtaggtaagaag

SEQ ID NO: 26442 - RNA, 20 nt, synthetic construct
  source 1..20: mol_type = other RNA
ggaagggcttgttcctgctg

SEQ ID NO: 26443 - RNA, 20 nt, synthetic construct
  source 1..20: mol_type = other RNA
ggaatgttcttaaagatcag

SEQ ID NO: 26444 - RNA, 20 nt, synthetic construct
  source 1..20: mol_type = other RNA
ggacagcaggacttacaaac

SEQ ID NO: 26445 - RNA, 20 nt, synthetic construct
  source 1..20: mol_type = other RNA
ggactcattcagggtagtat

SEQ ID NO: 26446 - RNA, 20 nt, synthetic construct
  source 1..20: mol_type = other RNA
ggacttacaaacaaaggcct

SEQ ID NO: 26447 - RNA, 20 nt, synthetic construct
  source 1..20: mol_type = other RNA
ggacttctccagtactttct

SEQ ID NO: 26448 - RNA, 20 nt, synthetic construct
  source 1..20: mol_type = other RNA
ggagaagtccaggattatag

SEQ ID NO: 26449 - RNA, 20 nt, synthetic construct
  source 1..20: mol_type = other RNA
ggagcagcagcagcacttgc

SEQ ID NO: 26450 - RNA, 20 nt, synthetic construct
  source 1..20: mol_type = other RNA
ggatgctaggacagcaggac

SEQ ID NO: 26451 - RNA, 20 nt, synthetic construct
  source 1..20: mol_type = other RNA
ggatgggactcattcagggt

SEQ ID NO: 26452 - RNA, 20 nt, synthetic construct
  source 1..20: mol_type = other RNA
ggattataggatgctaggac

SEQ ID NO: 26453 - RNA, 20 nt, synthetic construct
  source 1..20: mol_type = other RNA
ggattggtatctgaggctag

SEQ ID NO: 26454 - RNA, 20 nt, synthetic construct
  source 1..20: mol_type = other RNA
ggattgtcagggaatgttct

SEQ ID NO: 26455 - RNA, 20 nt, synthetic construct
  source 1..20: mol_type = other RNA
ggcacctgctgagatactga

SEQ ID NO: 26456 - RNA, 20 nt, synthetic construct
  source 1..20: mol_type = other RNA
ggcagaataggctgctgttc

SEQ ID NO: 26457 - RNA, 20 nt, synthetic construct
  source 1..20: mol_type = other RNA
ggcagcttcaggtatattta

SEQ ID NO: 26458 - RNA, 20 nt, synthetic construct
  source 1..20: mol_type = other RNA
ggccatactaccctgaatga

SEQ ID NO: 26459 - RNA, 20 nt, synthetic construct
  source 1..20: mol_type = other RNA
ggccatagaccttttttata

SEQ ID NO: 26460 - RNA, 20 nt, synthetic construct
  source 1..20: mol_type = other RNA
ggcctataccttcttgagat

SEQ ID NO: 26461 - RNA, 20 nt, synthetic construct
  source 1..20: mol_type = other RNA
ggcctttgtttgtaagtcct

SEQ ID NO: 26462 - RNA, 20 nt, synthetic construct
  source 1..20: mol_type = other RNA
ggctagtaggaagggcttgt

SEQ ID NO: 26463 - RNA, 20 nt, synthetic construct
  source 1..20: mol_type = other RNA
ggctgctgttcctacccatg

SEQ ID NO: 26464 - RNA, 20 nt, synthetic construct
  source 1..20: mol_type = other RNA
ggctggattggtatctgagg

SEQ ID NO: 26465 - RNA, 20 nt, synthetic construct
  source 1..20: mol_type = other RNA
ggctggcagaataggctgct

SEQ ID NO: 26466 - RNA, 20 nt, synthetic construct
  source 1..20: mol_type = other RNA
ggcttcctctagcttttgtg

SEQ ID NO: 26467 - RNA, 20 nt, synthetic construct
  source 1..20: mol_type = other RNA
ggcttgttcctgctgggtag

SEQ ID NO: 26468 - RNA, 20 nt, synthetic construct
  source 1..20: mol_type = other RNA
gggaaactactggttcagaa

SEQ ID NO: 26469 - RNA, 20 nt, synthetic construct
  source 1..20: mol_type = other RNA
gggaatgttcttaaagatca

SEQ ID NO: 26470 - RNA, 20 nt, synthetic construct
  source 1..20: mol_type = other RNA
gggactcattcagggtagta

SEQ ID NO: 26471 - RNA, 20 nt, synthetic construct
  source 1..20: mol_type = other RNA
gggagcagcagcagcacttg

SEQ ID NO: 26472 - RNA, 20 nt, synthetic construct
  source 1..20: mol_type = other RNA
gggatgggactcattcaggg

SEQ ID NO: 26473 - RNA, 20 nt, synthetic construct
  source 1..20: mol_type = other RNA
gggattgtcagggaatgttc

SEQ ID NO: 26474 - RNA, 20 nt, synthetic construct
  source 1..20: mol_type = other RNA
gggcttgttcctgctgggta

SEQ ID NO: 26475 - RNA, 20 nt, synthetic construct
  source 1..20: mol_type = other RNA
gggtagctctaaacaatgta

SEQ ID NO: 26476 - RNA, 20 nt, synthetic construct
  source 1..20: mol_type = other RNA
gggtaggaacagcagcctat

SEQ ID NO: 26477 - RNA, 20 nt, synthetic construct
  source 1..20: mol_type = other RNA
gggtagtatggccatagacc

SEQ ID NO: 26478 - RNA, 20 nt, synthetic construct
  source 1..20: mol_type = other RNA
ggtaagaagtgttaagagtg

SEQ ID NO: 26479 - RNA, 20 nt, synthetic construct
  source 1..20: mol_type = other RNA
ggtagctctaaacaatgtat

SEQ ID NO: 26480 - RNA, 20 nt, synthetic construct
  source 1..20: mol_type = other RNA
ggtaggaacagcagcctatt

SEQ ID NO: 26481 - RNA, 20 nt, synthetic construct
  source 1..20: mol_type = other RNA
ggtagtatggccatagacct

SEQ ID NO: 26482 - RNA, 20 nt, synthetic construct
  source 1..20: mol_type = other RNA
ggtataggcctttgtttgta

SEQ ID NO: 26483 - RNA, 20 nt, synthetic construct
  source 1..20: mol_type = other RNA
ggtatatttagcactgaacg

SEQ ID NO: 26484 - RNA, 20 nt, synthetic construct
  source 1..20: mol_type = other RNA
ggtatctgaggctagtagga

SEQ ID NO: 26485 - RNA, 20 nt, synthetic construct
  source 1..20: mol_type = other RNA
ggtctatggccatactaccc

SEQ ID NO: 26486 - RNA, 20 nt, synthetic construct
  source 1..20: mol_type = other RNA
ggtgccactaatctgatctt

SEQ ID NO: 26487 - RNA, 20 nt, synthetic construct
  source 1..20: mol_type = other RNA
ggttagaaataaggctggca

SEQ ID NO: 26488 - RNA, 20 nt, synthetic construct
  source 1..20: mol_type = other RNA
ggttcagaaaccatgctgtg

SEQ ID NO: 26489 - RNA, 20 nt, synthetic construct
  source 1..20: mol_type = other RNA
ggtttctgaaccagtagttt

SEQ ID NO: 26490 - RNA, 20 nt, synthetic construct
  source 1..20: mol_type = other RNA
gtaaaacttaatgtcttcct

SEQ ID NO: 26491 - RNA, 20 nt, synthetic construct
  source 1..20: mol_type = other RNA
gtaagaagtgttaagagtgt

SEQ ID NO: 26492 - RNA, 20 nt, synthetic construct
  source 1..20: mol_type = other RNA
gtaagctgctgaaagttgtg

SEQ ID NO: 26493 - RNA, 20 nt, synthetic construct
  source 1..20: mol_type = other RNA
gtaagtcctgctgtcctagc

SEQ ID NO: 26494 - RNA, 20 nt, synthetic construct
  source 1..20: mol_type = other RNA
gtaagtcttacattcttttg

SEQ ID NO: 26495 - RNA, 20 nt, synthetic construct
  source 1..20: mol_type = other RNA
gtacatggtattttaaaagt

SEQ ID NO: 26496 - RNA, 20 nt, synthetic construct
  source 1..20: mol_type = other RNA
gtactaacaaatgtctaaaa

SEQ ID NO: 26497 - RNA, 20 nt, synthetic construct
  source 1..20: mol_type = other RNA
gtactggagaagtccaggat

SEQ ID NO: 26498 - RNA, 20 nt, synthetic construct
  source 1..20: mol_type = other RNA
gtactttctggctggattgg

SEQ ID NO: 26499 - RNA, 20 nt, synthetic construct
  source 1..20: mol_type = other RNA
gtagctctaaacaatgtatt

SEQ ID NO: 26500 - RNA, 20 nt, synthetic construct
  source 1..20: mol_type = other RNA
gtaggaacagcagcctattc

SEQ ID NO: 26501 - RNA, 20 nt, synthetic construct
  source 1..20: mol_type = other RNA
gtaggaagggcttgttcctg

SEQ ID NO: 26502 - RNA, 20 nt, synthetic construct
  source 1..20: mol_type = other RNA
gtaggtaagaagtgttaaga

SEQ ID NO: 26503 - RNA, 20 nt, synthetic construct
  source 1..20: mol_type = other RNA
gtagtatggccatagacctt

SEQ ID NO: 26504 - RNA, 20 nt, synthetic construct
  source 1..20: mol_type = other RNA
gtagtcatatcataaagctg

SEQ ID NO: 26505 - RNA, 20 nt, synthetic construct
  source 1..20: mol_type = other RNA
gtagtttccctgcagttgag

SEQ ID NO: 26506 - RNA, 20 nt, synthetic construct
  source 1..20: mol_type = other RNA
gtataggcctttgtttgtaa

SEQ ID NO: 26507 - RNA, 20 nt, synthetic construct
  source 1..20: mol_type = other RNA
gtatatgtatttgtgcaagt

SEQ ID NO: 26508 - RNA, 20 nt, synthetic construct
  source 1..20: mol_type = other RNA
gtatatttagcactgaacga

SEQ ID NO: 26509 - RNA, 20 nt, synthetic construct
  source 1..20: mol_type = other RNA
gtatctcagcaggtgccact

SEQ ID NO: 26510 - RNA, 20 nt, synthetic construct
  source 1..20: mol_type = other RNA
gtatctgaggctagtaggaa

SEQ ID NO: 26511 - RNA, 20 nt, synthetic construct
  source 1..20: mol_type = other RNA
gtatgagtagtcatatcata

SEQ ID NO: 26512 - RNA, 20 nt, synthetic construct
  source 1..20: mol_type = other RNA
gtatggccatagaccttttt

SEQ ID NO: 26513 - RNA, 20 nt, synthetic construct
  source 1..20: mol_type = other RNA
gtattcatgggtaggaacag

SEQ ID NO: 26514 - RNA, 20 nt, synthetic construct
  source 1..20: mol_type = other RNA
gtatttgtgcaagtgctgct

SEQ ID NO: 26515 - RNA, 20 nt, synthetic construct
  source 1..20: mol_type = other RNA
gtcagggaatgttcttaaag

SEQ ID NO: 26516 - RNA, 20 nt, synthetic construct
  source 1..20: mol_type = other RNA
gtcatatcataaagctgctt

SEQ ID NO: 26517 - RNA, 20 nt, synthetic construct
  source 1..20: mol_type = other RNA
gtccaggattataggatgct

SEQ ID NO: 26518 - RNA, 20 nt, synthetic construct
  source 1..20: mol_type = other RNA
gtcccatcccatctgatata

SEQ ID NO: 26519 - RNA, 20 nt, synthetic construct
  source 1..20: mol_type = other RNA
gtcctagcatcctataatcc

SEQ ID NO: 26520 - RNA, 20 nt, synthetic construct
  source 1..20: mol_type = other RNA
gtcctgctgtcctagcatcc

SEQ ID NO: 26521 - RNA, 20 nt, synthetic construct
  source 1..20: mol_type = other RNA
gtctaaaatggttagaaata

SEQ ID NO: 26522 - RNA, 20 nt, synthetic construct
  source 1..20: mol_type = other RNA
gtctatggccatactaccct

SEQ ID NO: 26523 - RNA, 20 nt, synthetic construct
  source 1..20: mol_type = other RNA
gtcttacattcttttgtaag

SEQ ID NO: 26524 - RNA, 20 nt, synthetic construct
  source 1..20: mol_type = other RNA
gtgcaagtgctgctgctgct

SEQ ID NO: 26525 - RNA, 20 nt, synthetic construct
  source 1..20: mol_type = other RNA
gtgcatcagtatctcagcag

SEQ ID NO: 26526 - RNA, 20 nt, synthetic construct
  source 1..20: mol_type = other RNA
gtgccactaatctgatcttt

SEQ ID NO: 26527 - RNA, 20 nt, synthetic construct
  source 1..20: mol_type = other RNA
gtgctaaatatacctgaagc

SEQ ID NO: 26528 - RNA, 20 nt, synthetic construct
  source 1..20: mol_type = other RNA
gtgctgctgctgctccctgc

SEQ ID NO: 26529 - RNA, 20 nt, synthetic construct
  source 1..20: mol_type = other RNA
gtggcacctgctgagatact

SEQ ID NO: 26530 - RNA, 20 nt, synthetic construct
  source 1..20: mol_type = other RNA
gtggcagcttcaggtatatt

SEQ ID NO: 26531 - RNA, 20 nt, synthetic construct
  source 1..20: mol_type = other RNA
gtgtatatgtatttgtgcaa

SEQ ID NO: 26532 - RNA, 20 nt, synthetic construct
  source 1..20: mol_type = other RNA
gtgtatgagtagtcatatca

SEQ ID NO: 26533 - RNA, 20 nt, synthetic construct
  source 1..20: mol_type = other RNA
gtgttaagagtgtatatgta

SEQ ID NO: 26534 - RNA, 20 nt, synthetic construct
  source 1..20: mol_type = other RNA
gttaagagtgtatatgtatt

SEQ ID NO: 26535 - RNA, 20 nt, synthetic construct
  source 1..20: mol_type = other RNA
gttagaaataaggctggcag

SEQ ID NO: 26536 - RNA, 20 nt, synthetic construct
  source 1..20: mol_type = other RNA
gttagtacatggtattttaa

SEQ ID NO: 26537 - RNA, 20 nt, synthetic construct
  source 1..20: mol_type = other RNA
gttcagaaaccatgctgtgc

SEQ ID NO: 26538 - RNA, 20 nt, synthetic construct
  source 1..20: mol_type = other RNA
gttcagtgctaaatatacct

SEQ ID NO: 26539 - RNA, 20 nt, synthetic construct
  source 1..20: mol_type = other RNA
gttcctacccatgaatacat

SEQ ID NO: 26540 - RNA, 20 nt, synthetic construct
  source 1..20: mol_type = other RNA
gttcctgctgggtagctcta

SEQ ID NO: 26541 - RNA, 20 nt, synthetic construct
  source 1..20: mol_type = other RNA
gttcgttcagtgctaaatat

SEQ ID NO: 26542 - RNA, 20 nt, synthetic construct
  source 1..20: mol_type = other RNA
gttcttaaagatcagattag

SEQ ID NO: 26543 - RNA, 20 nt, synthetic construct
  source 1..20: mol_type = other RNA
gttgagcagggagcagcagc

SEQ ID NO: 26544 - RNA, 20 nt, synthetic construct
  source 1..20: mol_type = other RNA
gttgtgtatgagtagtcata

SEQ ID NO: 26545 - RNA, 20 nt, synthetic construct
  source 1..20: mol_type = other RNA
gtttagagctacccagcagg

SEQ ID NO: 26546 - RNA, 20 nt, synthetic construct
  source 1..20: mol_type = other RNA
gtttatatcagatgggatgg

SEQ ID NO: 26547 - RNA, 20 nt, synthetic construct
  source 1..20: mol_type = other RNA
gtttccctgcagttgagcag

SEQ ID NO: 26548 - RNA, 20 nt, synthetic construct
  source 1..20: mol_type = other RNA
gtttctgaaccagtagtttc

SEQ ID NO: 26549 - RNA, 20 nt, synthetic construct
  source 1..20: mol_type = other RNA
gtttgtaagtcctgctgtcc

SEQ ID NO: 26550 - RNA, 20 nt, synthetic construct
  source 1..20: mol_type = other RNA
taaaaaaggtctatggccat

SEQ ID NO: 26551 - RNA, 20 nt, synthetic construct
  source 1..20: mol_type = other RNA
taaaacttaatgtcttcctt

SEQ ID NO: 26552 - RNA, 20 nt, synthetic construct
  source 1..20: mol_type = other RNA
taaaataccatgtactaaca

SEQ ID NO: 26553 - RNA, 20 nt, synthetic construct
  source 1..20: mol_type = other RNA
taaaatggttagaaataagg

SEQ ID NO: 26554 - RNA, 20 nt, synthetic construct
  source 1..20: mol_type = other RNA
taaacaatctgcatattggg

SEQ ID NO: 26555 - RNA, 20 nt, synthetic construct
  source 1..20: mol_type = other RNA
taaacaatgtattcatgggt

SEQ ID NO: 26556 - RNA, 20 nt, synthetic construct
  source 1..20: mol_type = other RNA
taaagatcagattagtggca

SEQ ID NO: 26557 - RNA, 20 nt, synthetic construct
  source 1..20: mol_type = other RNA
taaagctgctttgatataaa

SEQ ID NO: 26558 - RNA, 20 nt, synthetic construct
  source 1..20: mol_type = other RNA
taaatatacctgaagctgcc

SEQ ID NO: 26559 - RNA, 20 nt, synthetic construct
  source 1..20: mol_type = other RNA
taacaaatgtctaaaatggt

SEQ ID NO: 26560 - RNA, 20 nt, synthetic construct
  source 1..20: mol_type = other RNA
taacacttcttacctactgg

SEQ ID NO: 26561 - RNA, 20 nt, synthetic construct
  source 1..20: mol_type = other RNA
taaccattttagacatttgt

SEQ ID NO: 26562 - RNA, 20 nt, synthetic construct
  source 1..20: mol_type = other RNA
taagaacattccctgacaat

SEQ ID NO: 26563 - RNA, 20 nt, synthetic construct
  source 1..20: mol_type = other RNA
taagaagtgttaagagtgta

SEQ ID NO: 26564 - RNA, 20 nt, synthetic construct
  source 1..20: mol_type = other RNA
taagagtgtatatgtatttg

SEQ ID NO: 26565 - RNA, 20 nt, synthetic construct
  source 1..20: mol_type = other RNA
taagctgctgaaagttgtgt

SEQ ID NO: 26566 - RNA, 20 nt, synthetic construct
  source 1..20: mol_type = other RNA
taaggctggcagaataggct

SEQ ID NO: 26567 - RNA, 20 nt, synthetic construct
  source 1..20: mol_type = other RNA
taagtcctgctgtcctagca

SEQ ID NO: 26568 - RNA, 20 nt, synthetic construct
  source 1..20: mol_type = other RNA
taagtcttacattcttttgt

SEQ ID NO: 26569 - RNA, 20 nt, synthetic construct
  source 1..20: mol_type = other RNA
taatcctggacttctccagt

SEQ ID NO: 26570 - RNA, 20 nt, synthetic construct
  source 1..20: mol_type = other RNA
taatctgatctttaagaaca

SEQ ID NO: 26571 - RNA, 20 nt, synthetic construct
  source 1..20: mol_type = other RNA
tacaaacaaaggcctatacc

SEQ ID NO: 26572 - RNA, 20 nt, synthetic construct
  source 1..20: mol_type = other RNA
tacacaactttcagcagctt

SEQ ID NO: 26573 - RNA, 20 nt, synthetic construct
  source 1..20: mol_type = other RNA
tacactcttaacacttctta

SEQ ID NO: 26574 - RNA, 20 nt, synthetic construct
  source 1..20: mol_type = other RNA
tacatatacactcttaacac

SEQ ID NO: 26575 - RNA, 20 nt, synthetic construct
  source 1..20: mol_type = other RNA
tacattcttttgtaagctgc

SEQ ID NO: 26576 - RNA, 20 nt, synthetic construct
  source 1..20: mol_type = other RNA
tacattgtttagagctaccc

SEQ ID NO: 26577 - RNA, 20 nt, synthetic construct
  source 1..20: mol_type = other RNA
taccaatccagccagaaagt

SEQ ID NO: 26578 - RNA, 20 nt, synthetic construct
  source 1..20: mol_type = other RNA
taccatgtactaacaaatgt

SEQ ID NO: 26579 - RNA, 20 nt, synthetic construct
  source 1..20: mol_type = other RNA
tacccagcaggaacaagccc

SEQ ID NO: 26580 - RNA, 20 nt, synthetic construct
  source 1..20: mol_type = other RNA
tacccatgaatacattgttt

SEQ ID NO: 26581 - RNA, 20 nt, synthetic construct
  source 1..20: mol_type = other RNA
taccctgaatgagtcccatc

SEQ ID NO: 26582 - RNA, 20 nt, synthetic construct
  source 1..20: mol_type = other RNA
tacctactggcttcctctag

SEQ ID NO: 26583 - RNA, 20 nt, synthetic construct
  source 1..20: mol_type = other RNA
tacctgaagctgccacaaaa

SEQ ID NO: 26584 - RNA, 20 nt, synthetic construct
  source 1..20: mol_type = other RNA
taccttcttgagatgttcgt

SEQ ID NO: 26585 - RNA, 20 nt, synthetic construct
  source 1..20: mol_type = other RNA
tactaccctgaatgagtccc

SEQ ID NO: 26586 - RNA, 20 nt, synthetic construct
  source 1..20: mol_type = other RNA
tactagcctcagataccaat

SEQ ID NO: 26587 - RNA, 20 nt, synthetic construct
  source 1..20: mol_type = other RNA
tactcatacacaactttcag

SEQ ID NO: 26588 - RNA, 20 nt, synthetic construct
  source 1..20: mol_type = other RNA
tactgatgcacagcatggtt

SEQ ID NO: 26589 - RNA, 20 nt, synthetic construct
  source 1..20: mol_type = other RNA
tactggagaagtccaggatt

SEQ ID NO: 26590 - RNA, 20 nt, synthetic construct
  source 1..20: mol_type = other RNA
tactggcttcctctagcttt

SEQ ID NO: 26591 - RNA, 20 nt, synthetic construct
  source 1..20: mol_type = other RNA
tactggttcagaaaccatgc

SEQ ID NO: 26592 - RNA, 20 nt, synthetic construct
  source 1..20: mol_type = other RNA
tactttctggctggattggt

SEQ ID NO: 26593 - RNA, 20 nt, synthetic construct
  source 1..20: mol_type = other RNA
tagaaataaggctggcagaa

SEQ ID NO: 26594 - RNA, 20 nt, synthetic construct
  source 1..20: mol_type = other RNA
tagacatttgttagtacatg

SEQ ID NO: 26595 - RNA, 20 nt, synthetic construct
  source 1..20: mol_type = other RNA
tagagctacccagcaggaac

SEQ ID NO: 26596 - RNA, 20 nt, synthetic construct
  source 1..20: mol_type = other RNA
tagaggaagccagtaggtaa

SEQ ID NO: 26597 - RNA, 20 nt, synthetic construct
  source 1..20: mol_type = other RNA
tagcactgaacgaacatctc

SEQ ID NO: 26598 - RNA, 20 nt, synthetic construct
  source 1..20: mol_type = other RNA
tagcatcctataatcctgga

SEQ ID NO: 26599 - RNA, 20 nt, synthetic construct
  source 1..20: mol_type = other RNA
tagcctcagataccaatcca

SEQ ID NO: 26600 - RNA, 20 nt, synthetic construct
  source 1..20: mol_type = other RNA
tagctctaaacaatgtattc

SEQ ID NO: 26601 - RNA, 20 nt, synthetic construct
  source 1..20: mol_type = other RNA
tagcttttgtggcagcttca

SEQ ID NO: 26602 - RNA, 20 nt, synthetic construct
  source 1..20: mol_type = other RNA
taggaacagcagcctattct

SEQ ID NO: 26603 - RNA, 20 nt, synthetic construct
  source 1..20: mol_type = other RNA
taggaagggcttgttcctgc

SEQ ID NO: 26604 - RNA, 20 nt, synthetic construct
  source 1..20: mol_type = other RNA
taggacagcaggacttacaa

SEQ ID NO: 26605 - RNA, 20 nt, synthetic construct
  source 1..20: mol_type = other RNA
taggatgctaggacagcagg

SEQ ID NO: 26606 - RNA, 20 nt, synthetic construct
  source 1..20: mol_type = other RNA
taggcctttgtttgtaagtc

SEQ ID NO: 26607 - RNA, 20 nt, synthetic construct
  source 1..20: mol_type = other RNA
taggctgctgttcctaccca

SEQ ID NO: 26608 - RNA, 20 nt, synthetic construct
  source 1..20: mol_type = other RNA
taggtaagaagtgttaagag

SEQ ID NO: 26609 - RNA, 20 nt, synthetic construct
  source 1..20: mol_type = other RNA
tagtaggaagggcttgttcc

SEQ ID NO: 26610 - RNA, 20 nt, synthetic construct
  source 1..20: mol_type = other RNA
tagtatggccatagaccttt

SEQ ID NO: 26611 - RNA, 20 nt, synthetic construct
  source 1..20: mol_type = other RNA
tagtcatatcataaagctgc

SEQ ID NO: 26612 - RNA, 20 nt, synthetic construct
  source 1..20: mol_type = other RNA
tagtggcacctgctgagata

SEQ ID NO: 26613 - RNA, 20 nt, synthetic construct
  source 1..20: mol_type = other RNA
tagtttccctgcagttgagc

SEQ ID NO: 26614 - RNA, 20 nt, synthetic construct
  source 1..20: mol_type = other RNA
tataaaaaaggtctatggcc

SEQ ID NO: 26615 - RNA, 20 nt, synthetic construct
  source 1..20: mol_type = other RNA
tataaacaatctgcatattg

SEQ ID NO: 26616 - RNA, 20 nt, synthetic construct
  source 1..20: mol_type = other RNA
tataatcctggacttctcca

SEQ ID NO: 26617 - RNA, 20 nt, synthetic construct
  source 1..20: mol_type = other RNA
tatacactcttaacacttct

SEQ ID NO: 26618 - RNA, 20 nt, synthetic construct
  source 1..20: mol_type = other RNA
tatacctgaagctgccacaa

SEQ ID NO: 26619 - RNA, 20 nt, synthetic construct
  source 1..20: mol_type = other RNA
tataccttcttgagatgttc

SEQ ID NO: 26620 - RNA, 20 nt, synthetic construct
  source 1..20: mol_type = other RNA
tataggatgctaggacagca

SEQ ID NO: 26621 - RNA, 20 nt, synthetic construct
  source 1..20: mol_type = other RNA
tataggcctttgtttgtaag

SEQ ID NO: 26622 - RNA, 20 nt, synthetic construct
  source 1..20: mol_type = other RNA
tatatcaaagcagctttatg

SEQ ID NO: 26623 - RNA, 20 nt, synthetic construct
  source 1..20: mol_type = other RNA
tatatcagatgggatgggac

SEQ ID NO: 26624 - RNA, 20 nt, synthetic construct
  source 1..20: mol_type = other RNA
tatatgtatttgtgcaagtg

SEQ ID NO: 26625 - RNA, 20 nt, synthetic construct
  source 1..20: mol_type = other RNA
tatatttagcactgaacgaa

SEQ ID NO: 26626 - RNA, 20 nt, synthetic construct
  source 1..20: mol_type = other RNA
tatcaaagcagctttatgat

SEQ ID NO: 26627 - RNA, 20 nt, synthetic construct
  source 1..20: mol_type = other RNA
tatcagatgggatgggactc

SEQ ID NO: 26628 - RNA, 20 nt, synthetic construct
  source 1..20: mol_type = other RNA
tatcataaagctgctttgat

SEQ ID NO: 26629 - RNA, 20 nt, synthetic construct
  source 1..20: mol_type = other RNA
tatctcagcaggtgccacta

SEQ ID NO: 26630 - RNA, 20 nt, synthetic construct
  source 1..20: mol_type = other RNA
tatctgaggctagtaggaag

SEQ ID NO: 26631 - RNA, 20 nt, synthetic construct
  source 1..20: mol_type = other RNA
tatgaaaaagacagtggaga

SEQ ID NO: 26632 - RNA, 20 nt, synthetic construct
  source 1..20: mol_type = other RNA
tatgactactcatacacaac

SEQ ID NO: 26633 - RNA, 20 nt, synthetic construct
  source 1..20: mol_type = other RNA
tatgagtagtcatatcataa

SEQ ID NO: 26634 - RNA, 20 nt, synthetic construct
  source 1..20: mol_type = other RNA
tatgatatgactactcatac

SEQ ID NO: 26635 - RNA, 20 nt, synthetic construct
  source 1..20: mol_type = other RNA
tatgcagattgtttatatca

SEQ ID NO: 26636 - RNA, 20 nt, synthetic construct
  source 1..20: mol_type = other RNA
tatggccatactaccctgaa

SEQ ID NO: 26637 - RNA, 20 nt, synthetic construct
  source 1..20: mol_type = other RNA
tatggccatagacctttttt

SEQ ID NO: 26638 - RNA, 20 nt, synthetic construct
  source 1..20: mol_type = other RNA
tatgtatttgtgcaagtgct

SEQ ID NO: 26639 - RNA, 20 nt, synthetic construct
  source 1..20: mol_type = other RNA
tattcatgggtaggaacagc

SEQ ID NO: 26640 - RNA, 20 nt, synthetic construct
  source 1..20: mol_type = other RNA
tattctgccagccttatttc

SEQ ID NO: 26641 - RNA, 20 nt, synthetic construct
  source 1..20: mol_type = other RNA
tattgggattgtcagggaat

SEQ ID NO: 26642 - RNA, 20 nt, synthetic construct
  source 1..20: mol_type = other RNA
tatttagcactgaacgaaca

SEQ ID NO: 26643 - RNA, 20 nt, synthetic construct
  source 1..20: mol_type = other RNA
tatttctaaccattttagac

SEQ ID NO: 26644 - RNA, 20 nt, synthetic construct
  source 1..20: mol_type = other RNA
tatttgtgcaagtgctgctg

SEQ ID NO: 26645 - RNA, 20 nt, synthetic construct
  source 1..20: mol_type = other RNA
tcaaagcagctttatgatat

SEQ ID NO: 26646 - RNA, 20 nt, synthetic construct
  source 1..20: mol_type = other RNA
tcaactgcagggaaactact

SEQ ID NO: 26647 - RNA, 20 nt, synthetic construct
  source 1..20: mol_type = other RNA
tcaagaaggtataggccttt

SEQ ID NO: 26648 - RNA, 20 nt, synthetic construct
  source 1..20: mol_type = other RNA
tcagaaaccatgctgtgcat

SEQ ID NO: 26649 - RNA, 20 nt, synthetic construct
  source 1..20: mol_type = other RNA
tcagataccaatccagccag

SEQ ID NO: 26650 - RNA, 20 nt, synthetic construct
  source 1..20: mol_type = other RNA
tcagatgggatgggactcat

SEQ ID NO: 26651 - RNA, 20 nt, synthetic construct
  source 1..20: mol_type = other RNA
tcagattagtggcacctgct

SEQ ID NO: 26652 - RNA, 20 nt, synthetic construct
  source 1..20: mol_type = other RNA
tcagcagcttacaaaagaat

SEQ ID NO: 26653 - RNA, 20 nt, synthetic construct
  source 1..20: mol_type = other RNA
tcagcaggtgccactaatct

SEQ ID NO: 26654 - RNA, 20 nt, synthetic construct
  source 1..20: mol_type = other RNA
tcagggaatgttcttaaaga

SEQ ID NO: 26655 - RNA, 20 nt, synthetic construct
  source 1..20: mol_type = other RNA
tcagggtagtatggccatag

SEQ ID NO: 26656 - RNA, 20 nt, synthetic construct
  source 1..20: mol_type = other RNA
tcaggtatatttagcactga

SEQ ID NO: 26657 - RNA, 20 nt, synthetic construct
  source 1..20: mol_type = other RNA
tcagtatctcagcaggtgcc

SEQ ID NO: 26658 - RNA, 20 nt, synthetic construct
  source 1..20: mol_type = other RNA
tcagtgctaaatatacctga

SEQ ID NO: 26659 - RNA, 20 nt, synthetic construct
  source 1..20: mol_type = other RNA
tcataaagctgctttgatat

SEQ ID NO: 26660 - RNA, 20 nt, synthetic construct
  source 1..20: mol_type = other RNA
tcatacacaactttcagcag

SEQ ID NO: 26661 - RNA, 20 nt, synthetic construct
  source 1..20: mol_type = other RNA
tcatatcataaagctgcttt

SEQ ID NO: 26662 - RNA, 20 nt, synthetic construct
  source 1..20: mol_type = other RNA
tcatgggtaggaacagcagc

SEQ ID NO: 26663 - RNA, 20 nt, synthetic construct
  source 1..20: mol_type = other RNA
tcattcagggtagtatggcc

SEQ ID NO: 26664 - RNA, 20 nt, synthetic construct
  source 1..20: mol_type = other RNA
tccagccagaaagtactgga

SEQ ID NO: 26665 - RNA, 20 nt, synthetic construct
  source 1..20: mol_type = other RNA
tccaggattataggatgcta

SEQ ID NO: 26666 - RNA, 20 nt, synthetic construct
  source 1..20: mol_type = other RNA
tccagtactttctggctgga

SEQ ID NO: 26667 - RNA, 20 nt, synthetic construct
  source 1..20: mol_type = other RNA
tcccaatatgcagattgttt

SEQ ID NO: 26668 - RNA, 20 nt, synthetic construct
  source 1..20: mol_type = other RNA
tcccatcccatctgatataa

SEQ ID NO: 26669 - RNA, 20 nt, synthetic construct
  source 1..20: mol_type = other RNA
tcccatctgatataaacaat

SEQ ID NO: 26670 - RNA, 20 nt, synthetic construct
  source 1..20: mol_type = other RNA
tccctgacaatcccaatatg

SEQ ID NO: 26671 - RNA, 20 nt, synthetic construct
  source 1..20: mol_type = other RNA
tccctgcagttgagcaggga

SEQ ID NO: 26672 - RNA, 20 nt, synthetic construct
  source 1..20: mol_type = other RNA
tccctgctcaactgcaggga

SEQ ID NO: 26673 - RNA, 20 nt, synthetic construct
  source 1..20: mol_type = other RNA
tcctacccatgaatacattg

SEQ ID NO: 26674 - RNA, 20 nt, synthetic construct
  source 1..20: mol_type = other RNA
tcctactagcctcagatacc

SEQ ID NO: 26675 - RNA, 20 nt, synthetic construct
  source 1..20: mol_type = other RNA
tcctagcatcctataatcct

SEQ ID NO: 26676 - RNA, 20 nt, synthetic construct
  source 1..20: mol_type = other RNA
tcctataatcctggacttct

SEQ ID NO: 26677 - RNA, 20 nt, synthetic construct
  source 1..20: mol_type = other RNA
tcctctagcttttgtggcag

SEQ ID NO: 26678 - RNA, 20 nt, synthetic construct
  source 1..20: mol_type = other RNA
tcctgctgggtagctctaaa

SEQ ID NO: 26679 - RNA, 20 nt, synthetic construct
  source 1..20: mol_type = other RNA
tcctgctgtcctagcatcct

SEQ ID NO: 26680 - RNA, 20 nt, synthetic construct
  source 1..20: mol_type = other RNA
tcctggacttctccagtact

SEQ ID NO: 26681 - RNA, 20 nt, synthetic construct
  source 1..20: mol_type = other RNA
tcgttcagtgctaaatatac

SEQ ID NO: 26682 - RNA, 20 nt, synthetic construct
  source 1..20: mol_type = other RNA
tctaaacaatgtattcatgg

SEQ ID NO: 26683 - RNA, 20 nt, synthetic construct
  source 1..20: mol_type = other RNA
tctaaccattttagacattt

SEQ ID NO: 26684 - RNA, 20 nt, synthetic construct
  source 1..20: mol_type = other RNA
tctagcttttgtggcagctt

SEQ ID NO: 26685 - RNA, 20 nt, synthetic construct
  source 1..20: mol_type = other RNA
tctatggccatactaccctg

SEQ ID NO: 26686 - RNA, 20 nt, synthetic construct
  source 1..20: mol_type = other RNA
tctcaagaaggtataggcct

SEQ ID NO: 26687 - RNA, 20 nt, synthetic construct
  source 1..20: mol_type = other RNA
tctcagcaggtgccactaat

SEQ ID NO: 26688 - RNA, 20 nt, synthetic construct
  source 1..20: mol_type = other RNA
tctccagtactttctggctg

SEQ ID NO: 26689 - RNA, 20 nt, synthetic construct
  source 1..20: mol_type = other RNA
tctgaaccagtagtttccct

SEQ ID NO: 26690 - RNA, 20 nt, synthetic construct
  source 1..20: mol_type = other RNA
tctgaggctagtaggaaggg

SEQ ID NO: 26691 - RNA, 20 nt, synthetic construct
  source 1..20: mol_type = other RNA
tctgatataaacaatctgca

SEQ ID NO: 26692 - RNA, 20 nt, synthetic construct
  source 1..20: mol_type = other RNA
tctgatctttaagaacattc

SEQ ID NO: 26693 - RNA, 20 nt, synthetic construct
  source 1..20: mol_type = other RNA
tctgcatattgggattgtca

SEQ ID NO: 26694 - RNA, 20 nt, synthetic construct
  source 1..20: mol_type = other RNA
tctgccagccttatttctaa

SEQ ID NO: 26695 - RNA, 20 nt, synthetic construct
  source 1..20: mol_type = other RNA
tctggctggattggtatctg

SEQ ID NO: 26696 - RNA, 20 nt, synthetic construct
  source 1..20: mol_type = other RNA
tcttaaagatcagattagtg

SEQ ID NO: 26697 - RNA, 20 nt, synthetic construct
  source 1..20: mol_type = other RNA
tcttaacacttcttacctac

SEQ ID NO: 26698 - RNA, 20 nt, synthetic construct
  source 1..20: mol_type = other RNA
tcttacattcttttgtaagc

SEQ ID NO: 26699 - RNA, 20 nt, synthetic construct
  source 1..20: mol_type = other RNA
tcttacctactggcttcctc

SEQ ID NO: 26700 - RNA, 20 nt, synthetic construct
  source 1..20: mol_type = other RNA
tcttgagatgttcgttcagt

SEQ ID NO: 26701 - RNA, 20 nt, synthetic construct
  source 1..20: mol_type = other RNA
tctttaagaacattccctga

SEQ ID NO: 26702 - RNA, 20 nt, synthetic construct
  source 1..20: mol_type = other RNA
tcttttgtaagctgctgaaa

SEQ ID NO: 26703 - RNA, 20 nt, synthetic construct
  source 1..20: mol_type = other RNA
tgaaaaagacagtggagaaa

SEQ ID NO: 26704 - RNA, 20 nt, synthetic construct
  source 1..20: mol_type = other RNA
tgaaagttgtgtatgagtag

SEQ ID NO: 26705 - RNA, 20 nt, synthetic construct
  source 1..20: mol_type = other RNA
tgaaccagtagtttccctgc

SEQ ID NO: 26706 - RNA, 20 nt, synthetic construct
  source 1..20: mol_type = other RNA
tgaacgaacatctcaagaag

SEQ ID NO: 26707 - RNA, 20 nt, synthetic construct
  source 1..20: mol_type = other RNA
tgaagctgccacaaaagcta

SEQ ID NO: 26708 - RNA, 20 nt, synthetic construct
  source 1..20: mol_type = other RNA
tgaatacattgtttagagct

SEQ ID NO: 26709 - RNA, 20 nt, synthetic construct
  source 1..20: mol_type = other RNA
tgaatgagtcccatcccatc

SEQ ID NO: 26710 - RNA, 20 nt, synthetic construct
  source 1..20: mol_type = other RNA
tgacaatcccaatatgcaga

SEQ ID NO: 26711 - RNA, 20 nt, synthetic construct
  source 1..20: mol_type = other RNA
tgactactcatacacaactt

SEQ ID NO: 26712 - RNA, 20 nt, synthetic construct
  source 1..20: mol_type = other RNA
tgagatactgatgcacagca

SEQ ID NO: 26713 - RNA, 20 nt, synthetic construct
  source 1..20: mol_type = other RNA
tgagatgttcgttcagtgct

SEQ ID NO: 26714 - RNA, 20 nt, synthetic construct
  source 1..20: mol_type = other RNA
tgagcagggagcagcagcag

SEQ ID NO: 26715 - RNA, 20 nt, synthetic construct
  source 1..20: mol_type = other RNA
tgaggctagtaggaagggct

SEQ ID NO: 26716 - RNA, 20 nt, synthetic construct
  source 1..20: mol_type = other RNA
tgagtagtcatatcataaag

SEQ ID NO: 26717 - RNA, 20 nt, synthetic construct
  source 1..20: mol_type = other RNA
tgagtcccatcccatctgat

SEQ ID NO: 26718 - RNA, 20 nt, synthetic construct
  source 1..20: mol_type = other RNA
tgatataaaaaaggtctatg

SEQ ID NO: 26719 - RNA, 20 nt, synthetic construct
  source 1..20: mol_type = other RNA
tgatataaacaatctgcata

SEQ ID NO: 26720 - RNA, 20 nt, synthetic construct
  source 1..20: mol_type = other RNA
tgatatgactactcatacac

SEQ ID NO: 26721 - RNA, 20 nt, synthetic construct
  source 1..20: mol_type = other RNA
tgatctttaagaacattccc

SEQ ID NO: 26722 - RNA, 20 nt, synthetic construct
  source 1..20: mol_type = other RNA
tgatgcacagcatggtttct

SEQ ID NO: 26723 - RNA, 20 nt, synthetic construct
  source 1..20: mol_type = other RNA
tgcaagtgctgctgctgctc

SEQ ID NO: 26724 - RNA, 20 nt, synthetic construct
  source 1..20: mol_type = other RNA
tgcacaaatacatatacact

SEQ ID NO: 26725 - RNA, 20 nt, synthetic construct
  source 1..20: mol_type = other RNA
tgcacagcatggtttctgaa

SEQ ID NO: 26726 - RNA, 20 nt, synthetic construct
  source 1..20: mol_type = other RNA
tgcagattgtttatatcaga

SEQ ID NO: 26727 - RNA, 20 nt, synthetic construct
  source 1..20: mol_type = other RNA
tgcagggaaactactggttc

SEQ ID NO: 26728 - RNA, 20 nt, synthetic construct
  source 1..20: mol_type = other RNA
tgcagttgagcagggagcag

SEQ ID NO: 26729 - RNA, 20 nt, synthetic construct
  source 1..20: mol_type = other RNA
tgcatattgggattgtcagg

SEQ ID NO: 26730 - RNA, 20 nt, synthetic construct
  source 1..20: mol_type = other RNA
tgcatcagtatctcagcagg

SEQ ID NO: 26731 - RNA, 20 nt, synthetic construct
  source 1..20: mol_type = other RNA
tgccacaaaagctagaggaa

SEQ ID NO: 26732 - RNA, 20 nt, synthetic construct
  source 1..20: mol_type = other RNA
tgccactaatctgatcttta

SEQ ID NO: 26733 - RNA, 20 nt, synthetic construct
  source 1..20: mol_type = other RNA
tgccagccttatttctaacc

SEQ ID NO: 26734 - RNA, 20 nt, synthetic construct
  source 1..20: mol_type = other RNA
tgctaaatatacctgaagct

SEQ ID NO: 26735 - RNA, 20 nt, synthetic construct
  source 1..20: mol_type = other RNA
tgctaggacagcaggactta

SEQ ID NO: 26736 - RNA, 20 nt, synthetic construct
  source 1..20: mol_type = other RNA
tgctcaactgcagggaaact

SEQ ID NO: 26737 - RNA, 20 nt, synthetic construct
  source 1..20: mol_type = other RNA
tgctccctgctcaactgcag

SEQ ID NO: 26738 - RNA, 20 nt, synthetic construct
  source 1..20: mol_type = other RNA
tgctgaaagttgtgtatgag

SEQ ID NO: 26739 - RNA, 20 nt, synthetic construct
  source 1..20: mol_type = other RNA
tgctgagatactgatgcaca

SEQ ID NO: 26740 - RNA, 20 nt, synthetic construct
  source 1..20: mol_type = other RNA
tgctgctccctgctcaactg

SEQ ID NO: 26741 - RNA, 20 nt, synthetic construct
  source 1..20: mol_type = other RNA
tgctgctgctccctgctcaa

SEQ ID NO: 26742 - RNA, 20 nt, synthetic construct
  source 1..20: mol_type = other RNA
tgctgctgctgctccctgct

SEQ ID NO: 26743 - RNA, 20 nt, synthetic construct
  source 1..20: mol_type = other RNA
tgctgggtagctctaaacaa

SEQ ID NO: 26744 - RNA, 20 nt, synthetic construct
  source 1..20: mol_type = other RNA
tgctgtcctagcatcctata

SEQ ID NO: 26745 - RNA, 20 nt, synthetic construct
  source 1..20: mol_type = other RNA
tgctgtgcatcagtatctca

SEQ ID NO: 26746 - RNA, 20 nt, synthetic construct
  source 1..20: mol_type = other RNA
tgctgttcctacccatgaat

SEQ ID NO: 26747 - RNA, 20 nt, synthetic construct
  source 1..20: mol_type = other RNA
tgctttgatataaaaaaggt

SEQ ID NO: 26748 - RNA, 20 nt, synthetic construct
  source 1..20: mol_type = other RNA
tggacttctccagtactttc

SEQ ID NO: 26749 - RNA, 20 nt, synthetic construct
  source 1..20: mol_type = other RNA
tggagaagtccaggattata

SEQ ID NO: 26750 - RNA, 20 nt, synthetic construct
  source 1..20: mol_type = other RNA
tggattggtatctgaggcta

SEQ ID NO: 26751 - RNA, 20 nt, synthetic construct
  source 1..20: mol_type = other RNA
tggcacctgctgagatactg

SEQ ID NO: 26752 - RNA, 20 nt, synthetic construct
  source 1..20: mol_type = other RNA
tggcagaataggctgctgtt

SEQ ID NO: 26753 - RNA, 20 nt, synthetic construct
  source 1..20: mol_type = other RNA
tggcagcttcaggtatattt

SEQ ID NO: 26754 - RNA, 20 nt, synthetic construct
  source 1..20: mol_type = other RNA
tggccatactaccctgaatg

SEQ ID NO: 26755 - RNA, 20 nt, synthetic construct
  source 1..20: mol_type = other RNA
tggccatagaccttttttat

SEQ ID NO: 26756 - RNA, 20 nt, synthetic construct
  source 1..20: mol_type = other RNA
tggctggattggtatctgag

SEQ ID NO: 26757 - RNA, 20 nt, synthetic construct
  source 1..20: mol_type = other RNA
tggcttcctctagcttttgt

SEQ ID NO: 26758 - RNA, 20 nt, synthetic construct
  source 1..20: mol_type = other RNA
tgggactcattcagggtagt

SEQ ID NO: 26759 - RNA, 20 nt, synthetic construct
  source 1..20: mol_type = other RNA
tgggatgggactcattcagg

SEQ ID NO: 26760 - RNA, 20 nt, synthetic construct
  source 1..20: mol_type = other RNA
tgggattgtcagggaatgtt

SEQ ID NO: 26761 - RNA, 20 nt, synthetic construct
  source 1..20: mol_type = other RNA
tgggtagctctaaacaatgt

SEQ ID NO: 26762 - RNA, 20 nt, synthetic construct
  source 1..20: mol_type = other RNA
tgggtaggaacagcagccta

SEQ ID NO: 26763 - RNA, 20 nt, synthetic construct
  source 1..20: mol_type = other RNA
tggtatctgaggctagtagg

SEQ ID NO: 26764 - RNA, 20 nt, synthetic construct
  source 1..20: mol_type = other RNA
tggttagaaataaggctggc

SEQ ID NO: 26765 - RNA, 20 nt, synthetic construct
  source 1..20: mol_type = other RNA
tggttcagaaaccatgctgt

SEQ ID NO: 26766 - RNA, 20 nt, synthetic construct
  source 1..20: mol_type = other RNA
tggtttctgaaccagtagtt

SEQ ID NO: 26767 - RNA, 20 nt, synthetic construct
  source 1..20: mol_type = other RNA
tgtaagctgctgaaagttgt

SEQ ID NO: 26768 - RNA, 20 nt, synthetic construct
  source 1..20: mol_type = other RNA
tgtaagtcctgctgtcctag

SEQ ID NO: 26769 - RNA, 20 nt, synthetic construct
  source 1..20: mol_type = other RNA
tgtactaacaaatgtctaaa

SEQ ID NO: 26770 - RNA, 20 nt, synthetic construct
  source 1..20: mol_type = other RNA
tgtatatgtatttgtgcaag

SEQ ID NO: 26771 - RNA, 20 nt, synthetic construct
  source 1..20: mol_type = other RNA
tgtatgagtagtcatatcat

SEQ ID NO: 26772 - RNA, 20 nt, synthetic construct
  source 1..20: mol_type = other RNA
tgtattcatgggtaggaaca

SEQ ID NO: 26773 - RNA, 20 nt, synthetic construct
  source 1..20: mol_type = other RNA
tgtatttgtgcaagtgctgc

SEQ ID NO: 26774 - RNA, 20 nt, synthetic construct
  source 1..20: mol_type = other RNA
tgtcagggaatgttcttaaa

SEQ ID NO: 26775 - RNA, 20 nt, synthetic construct
  source 1..20: mol_type = other RNA
tgtcctagcatcctataatc

SEQ ID NO: 26776 - RNA, 20 nt, synthetic construct
  source 1..20: mol_type = other RNA
tgtctaaaatggttagaaat

SEQ ID NO: 26777 - RNA, 20 nt, synthetic construct
  source 1..20: mol_type = other RNA
tgtgcaagtgctgctgctgc

SEQ ID NO: 26778 - RNA, 20 nt, synthetic construct
  source 1..20: mol_type = other RNA
tgtgcatcagtatctcagca

SEQ ID NO: 26779 - RNA, 20 nt, synthetic construct
  source 1..20: mol_type = other RNA
tgtggcagcttcaggtatat

SEQ ID NO: 26780 - RNA, 20 nt, synthetic construct
  source 1..20: mol_type = other RNA
tgtgtatgagtagtcatatc

SEQ ID NO: 26781 - RNA, 20 nt, synthetic construct
  source 1..20: mol_type = other RNA
tgttaagagtgtatatgtat

SEQ ID NO: 26782 - RNA, 20 nt, synthetic construct
  source 1..20: mol_type = other RNA
tgttagtacatggtatttta

SEQ ID NO: 26783 - RNA, 20 nt, synthetic construct
  source 1..20: mol_type = other RNA
tgttcctacccatgaataca

SEQ ID NO: 26784 - RNA, 20 nt, synthetic construct
  source 1..20: mol_type = other RNA
tgttcctgctgggtagctct

SEQ ID NO: 26785 - RNA, 20 nt, synthetic construct
  source 1..20: mol_type = other RNA
tgttcgttcagtgctaaata

SEQ ID NO: 26786 - RNA, 20 nt, synthetic construct
  source 1..20: mol_type = other RNA
tgttcttaaagatcagatta

SEQ ID NO: 26787 - RNA, 20 nt, synthetic construct
  source 1..20: mol_type = other RNA
tgtttagagctacccagcag

SEQ ID NO: 26788 - RNA, 20 nt, synthetic construct
  source 1..20: mol_type = other RNA
tgtttatatcagatgggatg

SEQ ID NO: 26789 - RNA, 20 nt, synthetic construct
  source 1..20: mol_type = other RNA
tgtttgtaagtcctgctgtc

SEQ ID NO: 26790 - RNA, 20 nt, synthetic construct
  source 1..20: mol_type = other RNA
ttaaaataccatgtactaac

SEQ ID NO: 26791 - RNA, 20 nt, synthetic construct
  source 1..20: mol_type = other RNA
ttaaagatcagattagtggc

SEQ ID NO: 26792 - RNA, 20 nt, synthetic construct
  source 1..20: mol_type = other RNA
ttaacacttcttacctactg

SEQ ID NO: 26793 - RNA, 20 nt, synthetic construct
  source 1..20: mol_type = other RNA
ttaagaacattccctgacaa

SEQ ID NO: 26794 - RNA, 20 nt, synthetic construct
  source 1..20: mol_type = other RNA
ttacaaacaaaggcctatac

SEQ ID NO: 26795 - RNA, 20 nt, synthetic construct
  source 1..20: mol_type = other RNA
ttacattcttttgtaagctg

SEQ ID NO: 26796 - RNA, 20 nt, synthetic construct
  source 1..20: mol_type = other RNA
ttacctactggcttcctcta

SEQ ID NO: 26797 - RNA, 20 nt, synthetic construct
  source 1..20: mol_type = other RNA
ttagaaataaggctggcaga

SEQ ID NO: 26798 - RNA, 20 nt, synthetic construct
  source 1..20: mol_type = other RNA
ttagacatttgttagtacat

SEQ ID NO: 26799 - RNA, 20 nt, synthetic construct
  source 1..20: mol_type = other RNA
ttagagctacccagcaggaa

SEQ ID NO: 26800 - RNA, 20 nt, synthetic construct
  source 1..20: mol_type = other RNA
ttagcactgaacgaacatct

SEQ ID NO: 26801 - RNA, 20 nt, synthetic construct
  source 1..20: mol_type = other RNA
ttagtggcacctgctgagat

SEQ ID NO: 26802 - RNA, 20 nt, synthetic construct
  source 1..20: mol_type = other RNA
ttataggatgctaggacagc

SEQ ID NO: 26803 - RNA, 20 nt, synthetic construct
  source 1..20: mol_type = other RNA
ttatatcaaagcagctttat

SEQ ID NO: 26804 - RNA, 20 nt, synthetic construct
  source 1..20: mol_type = other RNA
ttatatcagatgggatggga

SEQ ID NO: 26805 - RNA, 20 nt, synthetic construct
  source 1..20: mol_type = other RNA
ttatgatatgactactcata

SEQ ID NO: 26806 - RNA, 20 nt, synthetic construct
  source 1..20: mol_type = other RNA
ttcagaaaccatgctgtgca

SEQ ID NO: 26807 - RNA, 20 nt, synthetic construct
  source 1..20: mol_type = other RNA
ttcagcagcttacaaaagaa

SEQ ID NO: 26808 - RNA, 20 nt, synthetic construct
  source 1..20: mol_type = other RNA
ttcaggtatatttagcactg

SEQ ID NO: 26809 - RNA, 20 nt, synthetic construct
  source 1..20: mol_type = other RNA
ttcagtgctaaatatacctg

SEQ ID NO: 26810 - RNA, 20 nt, synthetic construct
  source 1..20: mol_type = other RNA
ttcatgggtaggaacagcag

SEQ ID NO: 26811 - RNA, 20 nt, synthetic construct
  source 1..20: mol_type = other RNA
ttccctgacaatcccaatat

SEQ ID NO: 26812 - RNA, 20 nt, synthetic construct
  source 1..20: mol_type = other RNA
ttccctgcagttgagcaggg

SEQ ID NO: 26813 - RNA, 20 nt, synthetic construct
  source 1..20: mol_type = other RNA
ttcctacccatgaatacatt

SEQ ID NO: 26814 - RNA, 20 nt, synthetic construct
  source 1..20: mol_type = other RNA
ttcctactagcctcagatac

SEQ ID NO: 26815 - RNA, 20 nt, synthetic construct
  source 1..20: mol_type = other RNA
ttcctctagcttttgtggca

SEQ ID NO: 26816 - RNA, 20 nt, synthetic construct
  source 1..20: mol_type = other RNA
ttcctgctgggtagctctaa

SEQ ID NO: 26817 - RNA, 20 nt, synthetic construct
  source 1..20: mol_type = other RNA
ttcgttcagtgctaaatata

SEQ ID NO: 26818 - RNA, 20 nt, synthetic construct
  source 1..20: mol_type = other RNA
ttctaaccattttagacatt

SEQ ID NO: 26819 - RNA, 20 nt, synthetic construct
  source 1..20: mol_type = other RNA
ttctccagtactttctggct

SEQ ID NO: 26820 - RNA, 20 nt, synthetic construct
  source 1..20: mol_type = other RNA
ttctgaaccagtagtttccc

SEQ ID NO: 26821 - RNA, 20 nt, synthetic construct
  source 1..20: mol_type = other RNA
ttctgccagccttatttcta

SEQ ID NO: 26822 - RNA, 20 nt, synthetic construct
  source 1..20: mol_type = other RNA
ttctggctggattggtatct

SEQ ID NO: 26823 - RNA, 20 nt, synthetic construct
  source 1..20: mol_type = other RNA
ttcttaaagatcagattagt

SEQ ID NO: 26824 - RNA, 20 nt, synthetic construct
  source 1..20: mol_type = other RNA
ttcttacctactggcttcct

SEQ ID NO: 26825 - RNA, 20 nt, synthetic construct
  source 1..20: mol_type = other RNA
ttcttgagatgttcgttcag

SEQ ID NO: 26826 - RNA, 20 nt, synthetic construct
  source 1..20: mol_type = other RNA
ttcttttgtaagctgctgaa

SEQ ID NO: 26827 - RNA, 20 nt, synthetic construct
  source 1..20: mol_type = other RNA
ttgagatgttcgttcagtgc

SEQ ID NO: 26828 - RNA, 20 nt, synthetic construct
  source 1..20: mol_type = other RNA
ttgagcagggagcagcagca

SEQ ID NO: 26829 - RNA, 20 nt, synthetic construct
  source 1..20: mol_type = other RNA
ttgcacaaatacatatacac

SEQ ID NO: 26830 - RNA, 20 nt, synthetic construct
  source 1..20: mol_type = other RNA
ttgggattgtcagggaatgt

SEQ ID NO: 26831 - RNA, 20 nt, synthetic construct
  source 1..20: mol_type = other RNA
ttggtatctgaggctagtag

SEQ ID NO: 26832 - RNA, 20 nt, synthetic construct
  source 1..20: mol_type = other RNA
ttgtaagctgctgaaagttg

SEQ ID NO: 26833 - RNA, 20 nt, synthetic construct
  source 1..20: mol_type = other RNA
ttgtaagtcctgctgtccta

SEQ ID NO: 26834 - RNA, 20 nt, synthetic construct
  source 1..20: mol_type = other RNA
ttgtcagggaatgttcttaa

SEQ ID NO: 26835 - RNA, 20 nt, synthetic construct
  source 1..20: mol_type = other RNA
ttgtgcaagtgctgctgctg

SEQ ID NO: 26836 - RNA, 20 nt, synthetic construct
  source 1..20: mol_type = other RNA
ttgtggcagcttcaggtata

SEQ ID NO: 26837 - RNA, 20 nt, synthetic construct
  source 1..20: mol_type = other RNA
ttgtgtatgagtagtcatat

SEQ ID NO: 26838 - RNA, 20 nt, synthetic construct
  source 1..20: mol_type = other RNA
ttgttagtacatggtatttt

SEQ ID NO: 26839 - RNA, 20 nt, synthetic construct
  source 1..20: mol_type = other RNA
ttgttcctgctgggtagctc

SEQ ID NO: 26840 - RNA, 20 nt, synthetic construct
  source 1..20: mol_type = other RNA
ttgtttagagctacccagca

SEQ ID NO: 26841 - RNA, 20 nt, synthetic construct
  source 1..20: mol_type = other RNA
ttgtttatatcagatgggat

SEQ ID NO: 26842 - RNA, 20 nt, synthetic construct
  source 1..20: mol_type = other RNA
ttgtttgtaagtcctgctgt

SEQ ID NO: 26843 - RNA, 20 nt, synthetic construct
  source 1..20: mol_type = other RNA
tttaagaacattccctgaca

SEQ ID NO: 26844 - RNA, 20 nt, synthetic construct
  source 1..20: mol_type = other RNA
tttagacatttgttagtaca

SEQ ID NO: 26845 - RNA, 20 nt, synthetic construct
  source 1..20: mol_type = other RNA
tttagagctacccagcagga

SEQ ID NO: 26846 - RNA, 20 nt, synthetic construct
  source 1..20: mol_type = other RNA
tttagcactgaacgaacatc

SEQ ID NO: 26847 - RNA, 20 nt, synthetic construct
  source 1..20: mol_type = other RNA
tttatatcaaagcagcttta

SEQ ID NO: 26848 - RNA, 20 nt, synthetic construct
  source 1..20: mol_type = other RNA
tttatatcagatgggatggg

SEQ ID NO: 26849 - RNA, 20 nt, synthetic construct
  source 1..20: mol_type = other RNA
tttatgatatgactactcat

SEQ ID NO: 26850 - RNA, 20 nt, synthetic construct
  source 1..20: mol_type = other RNA
tttcagcagcttacaaaaga

SEQ ID NO: 26851 - RNA, 20 nt, synthetic construct
  source 1..20: mol_type = other RNA
tttccctgcagttgagcagg

SEQ ID NO: 26852 - RNA, 20 nt, synthetic construct
  source 1..20: mol_type = other RNA
tttctaaccattttagacat

SEQ ID NO: 26853 - RNA, 20 nt, synthetic construct
  source 1..20: mol_type = other RNA
tttctgaaccagtagtttcc

SEQ ID NO: 26854 - RNA, 20 nt, synthetic construct
  source 1..20: mol_type = other RNA
tttctggctggattggtatc

SEQ ID NO: 26855 - RNA, 20 nt, synthetic construct
  source 1..20: mol_type = other RNA
tttgtaagctgctgaaagtt

SEQ ID NO: 26856 - RNA, 20 nt, synthetic construct
  source 1..20: mol_type = other RNA
tttgtaagtcctgctgtcct

SEQ ID NO: 26857 - RNA, 20 nt, synthetic construct
  source 1..20: mol_type = other RNA
tttgtgcaagtgctgctgct

SEQ ID NO: 26858 - RNA, 20 nt, synthetic construct
  source 1..20: mol_type = other RNA
tttgtggcagcttcaggtat

SEQ ID NO: 26859 - RNA, 20 nt, synthetic construct
  source 1..20: mol_type = other RNA
tttgttagtacatggtattt

SEQ ID NO: 26860 - RNA, 20 nt, synthetic construct
  source 1..20: mol_type = other RNA
tttgtttgtaagtcctgctg

SEQ ID NO: 26861 - RNA, 20 nt, synthetic construct
  source 1..20: mol_type = other RNA
ttttagacatttgttagtac

SEQ ID NO: 26862 - RNA, 20 nt, synthetic construct
  source 1..20: mol_type = other RNA
ttttatatcaaagcagcttt

SEQ ID NO: 26863 - RNA, 20 nt, synthetic construct
  source 1..20: mol_type = other RNA
ttttgtaagctgctgaaagt

SEQ ID NO: 26864 - RNA, 20 nt, synthetic construct
  source 1..20: mol_type = other RNA
ttttgtggcagcttcaggta

SEQ ID NO: 26865 - RNA, 20 nt, synthetic construct
  source 1..20: mol_type = other RNA
tttttatatcaaagcagctt

SEQ ID NO: 26866 - RNA, 20 nt, synthetic construct
  source 1..20: mol_type = other RNA
ttttttatatcaaagcagct

SEQ ID NO: 26867 - RNA, 21 nt, synthetic construct
  source 1..21: mol_type = other RNA
aaaaaaggtctatggccatac

SEQ ID NO: 26868 - RNA, 21 nt, synthetic construct
  source 1..21: mol_type = other RNA
aaaaagacagtggagaaaaaa

SEQ ID NO: 26869 - RNA, 21 nt, synthetic construct
  source 1..21: mol_type = other RNA
aaaaaggtctatggccatact

SEQ ID NO: 26870 - RNA, 21 nt, synthetic construct
  source 1..21: mol_type = other RNA
aaaagctagaggaagccagta

SEQ ID NO: 26871 - RNA, 21 nt, synthetic construct
  source 1..21: mol_type = other RNA
aaaaggtctatggccatacta

SEQ ID NO: 26872 - RNA, 21 nt, synthetic construct
  source 1..21: mol_type = other RNA
aaaatggttagaaataaggct

SEQ ID NO: 26873 - RNA, 21 nt, synthetic construct
  source 1..21: mol_type = other RNA
aaacaaaggcctataccttct

SEQ ID NO: 26874 - RNA, 21 nt, synthetic construct
  source 1..21: mol_type = other RNA
aaacaatctgcatattgggat

SEQ ID NO: 26875 - RNA, 21 nt, synthetic construct
  source 1..21: mol_type = other RNA
aaacaatgtattcatgggtag

SEQ ID NO: 26876 - RNA, 21 nt, synthetic construct
  source 1..21: mol_type = other RNA
aaaccatgctgtgcatcagta

SEQ ID NO: 26877 - RNA, 21 nt, synthetic construct
  source 1..21: mol_type = other RNA
aaactactggttcagaaacca

SEQ ID NO: 26878 - RNA, 21 nt, synthetic construct
  source 1..21: mol_type = other RNA
aaagatcagattagtggcacc

SEQ ID NO: 26879 - RNA, 21 nt, synthetic construct
  source 1..21: mol_type = other RNA
aaagcagctttatgatatgac

SEQ ID NO: 26880 - RNA, 21 nt, synthetic construct
  source 1..21: mol_type = other RNA
aaagctagaggaagccagtag

SEQ ID NO: 26881 - RNA, 21 nt, synthetic construct
  source 1..21: mol_type = other RNA
aaaggcctataccttcttgag

SEQ ID NO: 26882 - RNA, 21 nt, synthetic construct
  source 1..21: mol_type = other RNA
aaaggtctatggccatactac

SEQ ID NO: 26883 - RNA, 21 nt, synthetic construct
  source 1..21: mol_type = other RNA
aaagtactggagaagtccagg

SEQ ID NO: 26884 - RNA, 21 nt, synthetic construct
  source 1..21: mol_type = other RNA
aaagttgtgtatgagtagtca

SEQ ID NO: 26885 - RNA, 21 nt, synthetic construct
  source 1..21: mol_type = other RNA
aaataaggctggcagaatagg

SEQ ID NO: 26886 - RNA, 21 nt, synthetic construct
  source 1..21: mol_type = other RNA
aaatatacctgaagctgccac

SEQ ID NO: 26887 - RNA, 21 nt, synthetic construct
  source 1..21: mol_type = other RNA
aaatggttagaaataaggctg

SEQ ID NO: 26888 - RNA, 21 nt, synthetic construct
  source 1..21: mol_type = other RNA
aacaaaggcctataccttctt

SEQ ID NO: 26889 - RNA, 21 nt, synthetic construct
  source 1..21: mol_type = other RNA
aacaagcccttcctactagcc

SEQ ID NO: 26890 - RNA, 21 nt, synthetic construct
  source 1..21: mol_type = other RNA
aacaatctgcatattgggatt

SEQ ID NO: 26891 - RNA, 21 nt, synthetic construct
  source 1..21: mol_type = other RNA
aacaatgtattcatgggtagg

SEQ ID NO: 26892 - RNA, 21 nt, synthetic construct
  source 1..21: mol_type = other RNA
aacacttcttacctactggct

SEQ ID NO: 26893 - RNA, 21 nt, synthetic construct
  source 1..21: mol_type = other RNA
aacagcagcctattctgccag

SEQ ID NO: 26894 - RNA, 21 nt, synthetic construct
  source 1..21: mol_type = other RNA
aacatctcaagaaggtatagg

SEQ ID NO: 26895 - RNA, 21 nt, synthetic construct
  source 1..21: mol_type = other RNA
aacattccctgacaatcccaa

SEQ ID NO: 26896 - RNA, 21 nt, synthetic construct
  source 1..21: mol_type = other RNA
aaccagtagtttccctgcagt

SEQ ID NO: 26897 - RNA, 21 nt, synthetic construct
  source 1..21: mol_type = other RNA
aaccatgctgtgcatcagtat

SEQ ID NO: 26898 - RNA, 21 nt, synthetic construct
  source 1..21: mol_type = other RNA
aacgaacatctcaagaaggta

SEQ ID NO: 26899 - RNA, 21 nt, synthetic construct
  source 1..21: mol_type = other RNA
aactactggttcagaaaccat

SEQ ID NO: 26900 - RNA, 21 nt, synthetic construct
  source 1..21: mol_type = other RNA
aactgcagggaaactactggt

SEQ ID NO: 26901 - RNA, 21 nt, synthetic construct
  source 1..21: mol_type = other RNA
aactttcagcagcttacaaaa

SEQ ID NO: 26902 - RNA, 21 nt, synthetic construct
  source 1..21: mol_type = other RNA
aagaacattccctgacaatcc

SEQ ID NO: 26903 - RNA, 21 nt, synthetic construct
  source 1..21: mol_type = other RNA
aagaaggtataggcctttgtt

SEQ ID NO: 26904 - RNA, 21 nt, synthetic construct
  source 1..21: mol_type = other RNA
aagaagtgttaagagtgtata

SEQ ID NO: 26905 - RNA, 21 nt, synthetic construct
  source 1..21: mol_type = other RNA
aagagtgtatatgtatttgtg

SEQ ID NO: 26906 - RNA, 21 nt, synthetic construct
  source 1..21: mol_type = other RNA
aagatcagattagtggcacct

SEQ ID NO: 26907 - RNA, 21 nt, synthetic construct
  source 1..21: mol_type = other RNA
aagcagctttatgatatgact

SEQ ID NO: 26908 - RNA, 21 nt, synthetic construct
  source 1..21: mol_type = other RNA
aagccagtaggtaagaagtgt

SEQ ID NO: 26909 - RNA, 21 nt, synthetic construct
  source 1..21: mol_type = other RNA
aagcccttcctactagcctca

SEQ ID NO: 26910 - RNA, 21 nt, synthetic construct
  source 1..21: mol_type = other RNA
aagctagaggaagccagtagg

SEQ ID NO: 26911 - RNA, 21 nt, synthetic construct
  source 1..21: mol_type = other RNA
aagctgccacaaaagctagag

SEQ ID NO: 26912 - RNA, 21 nt, synthetic construct
  source 1..21: mol_type = other RNA
aagctgctgaaagttgtgtat

SEQ ID NO: 26913 - RNA, 21 nt, synthetic construct
  source 1..21: mol_type = other RNA
aaggaagacattaagttttac

SEQ ID NO: 26914 - RNA, 21 nt, synthetic construct
  source 1..21: mol_type = other RNA
aaggcctataccttcttgaga

SEQ ID NO: 26915 - RNA, 21 nt, synthetic construct
  source 1..21: mol_type = other RNA
aaggctggcagaataggctgc

SEQ ID NO: 26916 - RNA, 21 nt, synthetic construct
  source 1..21: mol_type = other RNA
aagggcttgttcctgctgggt

SEQ ID NO: 26917 - RNA, 21 nt, synthetic construct
  source 1..21: mol_type = other RNA
aaggtataggcctttgtttgt

SEQ ID NO: 26918 - RNA, 21 nt, synthetic construct
  source 1..21: mol_type = other RNA
aaggtctatggccatactacc

SEQ ID NO: 26919 - RNA, 21 nt, synthetic construct
  source 1..21: mol_type = other RNA
aagtaaaacttaatgtcttcc

SEQ ID NO: 26920 - RNA, 21 nt, synthetic construct
  source 1..21: mol_type = other RNA
aagtactggagaagtccagga

SEQ ID NO: 26921 - RNA, 21 nt, synthetic construct
  source 1..21: mol_type = other RNA
aagtccaggattataggatgc

SEQ ID NO: 26922 - RNA, 21 nt, synthetic construct
  source 1..21: mol_type = other RNA
aagtcctgctgtcctagcatc

SEQ ID NO: 26923 - RNA, 21 nt, synthetic construct
  source 1..21: mol_type = other RNA
aagtgctgctgctgctccctg

SEQ ID NO: 26924 - RNA, 21 nt, synthetic construct
  source 1..21: mol_type = other RNA
aagtgttaagagtgtatatgt

SEQ ID NO: 26925 - RNA, 21 nt, synthetic construct
  source 1..21: mol_type = other RNA
aagttgtgtatgagtagtcat

SEQ ID NO: 26926 - RNA, 21 nt, synthetic construct
  source 1..21: mol_type = other RNA
aataaggctggcagaataggc

SEQ ID NO: 26927 - RNA, 21 nt, synthetic construct
  source 1..21: mol_type = other RNA
aatacattgtttagagctacc

SEQ ID NO: 26928 - RNA, 21 nt, synthetic construct
  source 1..21: mol_type = other RNA
aataccatgtactaacaaatg

SEQ ID NO: 26929 - RNA, 21 nt, synthetic construct
  source 1..21: mol_type = other RNA
aataggctgctgttcctaccc

SEQ ID NO: 26930 - RNA, 21 nt, synthetic construct
  source 1..21: mol_type = other RNA
aatatacctgaagctgccaca

SEQ ID NO: 26931 - RNA, 21 nt, synthetic construct
  source 1..21: mol_type = other RNA
aatccagccagaaagtactgg

SEQ ID NO: 26932 - RNA, 21 nt, synthetic construct
  source 1..21: mol_type = other RNA
aatcccaatatgcagattgtt

SEQ ID NO: 26933 - RNA, 21 nt, synthetic construct
  source 1..21: mol_type = other RNA
aatcctggacttctccagtac

SEQ ID NO: 26934 - RNA, 21 nt, synthetic construct
  source 1..21: mol_type = other RNA
aatctgcatattgggattgtc

SEQ ID NO: 26935 - RNA, 21 nt, synthetic construct
  source 1..21: mol_type = other RNA
aatgagtcccatcccatctga

SEQ ID NO: 26936 - RNA, 21 nt, synthetic construct
  source 1..21: mol_type = other RNA
aatggttagaaataaggctgg

SEQ ID NO: 26937 - RNA, 21 nt, synthetic construct
  source 1..21: mol_type = other RNA
aatgtattcatgggtaggaac

SEQ ID NO: 26938 - RNA, 21 nt, synthetic construct
  source 1..21: mol_type = other RNA
acaaaagctagaggaagccag

SEQ ID NO: 26939 - RNA, 21 nt, synthetic construct
  source 1..21: mol_type = other RNA
acaaacaaaggcctatacctt

SEQ ID NO: 26940 - RNA, 21 nt, synthetic construct
  source 1..21: mol_type = other RNA
acaaaggcctataccttcttg

SEQ ID NO: 26941 - RNA, 21 nt, synthetic construct
  source 1..21: mol_type = other RNA
acaaatgtctaaaatggttag

SEQ ID NO: 26942 - RNA, 21 nt, synthetic construct
  source 1..21: mol_type = other RNA
acaactttcagcagcttacaa

SEQ ID NO: 26943 - RNA, 21 nt, synthetic construct
  source 1..21: mol_type = other RNA
acaagcccttcctactagcct

SEQ ID NO: 26944 - RNA, 21 nt, synthetic construct
  source 1..21: mol_type = other RNA
acaatcccaatatgcagattg

SEQ ID NO: 26945 - RNA, 21 nt, synthetic construct
  source 1..21: mol_type = other RNA
acaatctgcatattgggattg

SEQ ID NO: 26946 - RNA, 21 nt, synthetic construct
  source 1..21: mol_type = other RNA
acaatgtattcatgggtagga

SEQ ID NO: 26947 - RNA, 21 nt, synthetic construct
  source 1..21: mol_type = other RNA
acacaactttcagcagcttac

SEQ ID NO: 26948 - RNA, 21 nt, synthetic construct
  source 1..21: mol_type = other RNA
acactcttaacacttcttacc

SEQ ID NO: 26949 - RNA, 21 nt, synthetic construct
  source 1..21: mol_type = other RNA
acacttcttacctactggctt

SEQ ID NO: 26950 - RNA, 21 nt, synthetic construct
  source 1..21: mol_type = other RNA
acagcagcctattctgccagc

SEQ ID NO: 26951 - RNA, 21 nt, synthetic construct
  source 1..21: mol_type = other RNA
acagcaggacttacaaacaaa

SEQ ID NO: 26952 - RNA, 21 nt, synthetic construct
  source 1..21: mol_type = other RNA
acagcatggtttctgaaccag

SEQ ID NO: 26953 - RNA, 21 nt, synthetic construct
  source 1..21: mol_type = other RNA
acatatacactcttaacactt

SEQ ID NO: 26954 - RNA, 21 nt, synthetic construct
  source 1..21: mol_type = other RNA
acatctcaagaaggtataggc

SEQ ID NO: 26955 - RNA, 21 nt, synthetic construct
  source 1..21: mol_type = other RNA
acattccctgacaatcccaat

SEQ ID NO: 26956 - RNA, 21 nt, synthetic construct
  source 1..21: mol_type = other RNA
acattcttttgtaagctgctg

SEQ ID NO: 26957 - RNA, 21 nt, synthetic construct
  source 1..21: mol_type = other RNA
acattgtttagagctacccag

SEQ ID NO: 26958 - RNA, 21 nt, synthetic construct
  source 1..21: mol_type = other RNA
acatttgttagtacatggtat

SEQ ID NO: 26959 - RNA, 21 nt, synthetic construct
  source 1..21: mol_type = other RNA
accaatccagccagaaagtac

SEQ ID NO: 26960 - RNA, 21 nt, synthetic construct
  source 1..21: mol_type = other RNA
accagtagtttccctgcagtt

SEQ ID NO: 26961 - RNA, 21 nt, synthetic construct
  source 1..21: mol_type = other RNA
accatgctgtgcatcagtatc

SEQ ID NO: 26962 - RNA, 21 nt, synthetic construct
  source 1..21: mol_type = other RNA
accatgtactaacaaatgtct

SEQ ID NO: 26963 - RNA, 21 nt, synthetic construct
  source 1..21: mol_type = other RNA
accattttagacatttgttag

SEQ ID NO: 26964 - RNA, 21 nt, synthetic construct
  source 1..21: mol_type = other RNA
acccagcaggaacaagccctt

SEQ ID NO: 26965 - RNA, 21 nt, synthetic construct
  source 1..21: mol_type = other RNA
acccatgaatacattgtttag

SEQ ID NO: 26966 - RNA, 21 nt, synthetic construct
  source 1..21: mol_type = other RNA
accctgaatgagtcccatccc

SEQ ID NO: 26967 - RNA, 21 nt, synthetic construct
  source 1..21: mol_type = other RNA
acctactggcttcctctagct

SEQ ID NO: 26968 - RNA, 21 nt, synthetic construct
  source 1..21: mol_type = other RNA
acctgaagctgccacaaaagc

SEQ ID NO: 26969 - RNA, 21 nt, synthetic construct
  source 1..21: mol_type = other RNA
acctgctgagatactgatgca

SEQ ID NO: 26970 - RNA, 21 nt, synthetic construct
  source 1..21: mol_type = other RNA
accttcttgagatgttcgttc

SEQ ID NO: 26971 - RNA, 21 nt, synthetic construct
  source 1..21: mol_type = other RNA
accttttttatatcaaagcag

SEQ ID NO: 26972 - RNA, 21 nt, synthetic construct
  source 1..21: mol_type = other RNA
acgaacatctcaagaaggtat

SEQ ID NO: 26973 - RNA, 21 nt, synthetic construct
  source 1..21: mol_type = other RNA
actaacaaatgtctaaaatgg

SEQ ID NO: 26974 - RNA, 21 nt, synthetic construct
  source 1..21: mol_type = other RNA
actaatctgatctttaagaac

SEQ ID NO: 26975 - RNA, 21 nt, synthetic construct
  source 1..21: mol_type = other RNA
actaccctgaatgagtcccat

SEQ ID NO: 26976 - RNA, 21 nt, synthetic construct
  source 1..21: mol_type = other RNA
actactcatacacaactttca

SEQ ID NO: 26977 - RNA, 21 nt, synthetic construct
  source 1..21: mol_type = other RNA
actactggttcagaaaccatg

SEQ ID NO: 26978 - RNA, 21 nt, synthetic construct
  source 1..21: mol_type = other RNA
actagcctcagataccaatcc

SEQ ID NO: 26979 - RNA, 21 nt, synthetic construct
  source 1..21: mol_type = other RNA
actcatacacaactttcagca

SEQ ID NO: 26980 - RNA, 21 nt, synthetic construct
  source 1..21: mol_type = other RNA
actcattcagggtagtatggc

SEQ ID NO: 26981 - RNA, 21 nt, synthetic construct
  source 1..21: mol_type = other RNA
actcttaacacttcttaccta

SEQ ID NO: 26982 - RNA, 21 nt, synthetic construct
  source 1..21: mol_type = other RNA
actgaacgaacatctcaagaa

SEQ ID NO: 26983 - RNA, 21 nt, synthetic construct
  source 1..21: mol_type = other RNA
actgatgcacagcatggtttc

SEQ ID NO: 26984 - RNA, 21 nt, synthetic construct
  source 1..21: mol_type = other RNA
actgcagggaaactactggtt

SEQ ID NO: 26985 - RNA, 21 nt, synthetic construct
  source 1..21: mol_type = other RNA
actggagaagtccaggattat

SEQ ID NO: 26986 - RNA, 21 nt, synthetic construct
  source 1..21: mol_type = other RNA
actggcttcctctagcttttg

SEQ ID NO: 26987 - RNA, 21 nt, synthetic construct
  source 1..21: mol_type = other RNA
actggttcagaaaccatgctg

SEQ ID NO: 26988 - RNA, 21 nt, synthetic construct
  source 1..21: mol_type = other RNA
acttacaaacaaaggcctata

SEQ ID NO: 26989 - RNA, 21 nt, synthetic construct
  source 1..21: mol_type = other RNA
acttctccagtactttctggc

SEQ ID NO: 26990 - RNA, 21 nt, synthetic construct
  source 1..21: mol_type = other RNA
acttcttacctactggcttcc

SEQ ID NO: 26991 - RNA, 21 nt, synthetic construct
  source 1..21: mol_type = other RNA
acttgcacaaatacatataca

SEQ ID NO: 26992 - RNA, 21 nt, synthetic construct
  source 1..21: mol_type = other RNA
actttcagcagcttacaaaag

SEQ ID NO: 26993 - RNA, 21 nt, synthetic construct
  source 1..21: mol_type = other RNA
actttctggctggattggtat

SEQ ID NO: 26994 - RNA, 21 nt, synthetic construct
  source 1..21: mol_type = other RNA
agaaaccatgctgtgcatcag

SEQ ID NO: 26995 - RNA, 21 nt, synthetic construct
  source 1..21: mol_type = other RNA
agaaagtactggagaagtcca

SEQ ID NO: 26996 - RNA, 21 nt, synthetic construct
  source 1..21: mol_type = other RNA
agaaataaggctggcagaata

SEQ ID NO: 26997 - RNA, 21 nt, synthetic construct
  source 1..21: mol_type = other RNA
agaacattccctgacaatccc

SEQ ID NO: 26998 - RNA, 21 nt, synthetic construct
  source 1..21: mol_type = other RNA
agaaggtataggcctttgttt

SEQ ID NO: 26999 - RNA, 21 nt, synthetic construct
  source 1..21: mol_type = other RNA
agaagtccaggattataggat

SEQ ID NO: 27000 - RNA, 21 nt, synthetic construct
  source 1..21: mol_type = other RNA
agaagtgttaagagtgtatat

SEQ ID NO: 27001 - RNA, 21 nt, synthetic construct
  source 1..21: mol_type = other RNA
agaataggctgctgttcctac

SEQ ID NO: 27002 - RNA, 21 nt, synthetic construct
  source 1..21: mol_type = other RNA
agacatttgttagtacatggt

SEQ ID NO: 27003 - RNA, 21 nt, synthetic construct
  source 1..21: mol_type = other RNA
agaccttttttatatcaaagc

SEQ ID NO: 27004 - RNA, 21 nt, synthetic construct
  source 1..21: mol_type = other RNA
agagctacccagcaggaacaa

SEQ ID NO: 27005 - RNA, 21 nt, synthetic construct
  source 1..21: mol_type = other RNA
agaggaagccagtaggtaaga

SEQ ID NO: 27006 - RNA, 21 nt, synthetic construct
  source 1..21: mol_type = other RNA
agagtgtatatgtatttgtgc

SEQ ID NO: 27007 - RNA, 21 nt, synthetic construct
  source 1..21: mol_type = other RNA
agataccaatccagccagaaa

SEQ ID NO: 27008 - RNA, 21 nt, synthetic construct
  source 1..21: mol_type = other RNA
agatactgatgcacagcatgg

SEQ ID NO: 27009 - RNA, 21 nt, synthetic construct
  source 1..21: mol_type = other RNA
agatcagattagtggcacctg

SEQ ID NO: 27010 - RNA, 21 nt, synthetic construct
  source 1..21: mol_type = other RNA
agatgggatgggactcattca

SEQ ID NO: 27011 - RNA, 21 nt, synthetic construct
  source 1..21: mol_type = other RNA
agatgttcgttcagtgctaaa

SEQ ID NO: 27012 - RNA, 21 nt, synthetic construct
  source 1..21: mol_type = other RNA
agattagtggcacctgctgag

SEQ ID NO: 27013 - RNA, 21 nt, synthetic construct
  source 1..21: mol_type = other RNA
agattgtttatatcagatggg

SEQ ID NO: 27014 - RNA, 21 nt, synthetic construct
  source 1..21: mol_type = other RNA
agcactgaacgaacatctcaa

SEQ ID NO: 27015 - RNA, 21 nt, synthetic construct
  source 1..21: mol_type = other RNA
agcacttgcacaaatacatat

SEQ ID NO: 27016 - RNA, 21 nt, synthetic construct
  source 1..21: mol_type = other RNA
agcagcacttgcacaaataca

SEQ ID NO: 27017 - RNA, 21 nt, synthetic construct
  source 1..21: mol_type = other RNA
agcagcagcacttgcacaaat

SEQ ID NO: 27018 - RNA, 21 nt, synthetic construct
  source 1..21: mol_type = other RNA
agcagcagcagcacttgcaca

SEQ ID NO: 27019 - RNA, 21 nt, synthetic construct
  source 1..21: mol_type = other RNA
agcagcctattctgccagcct

SEQ ID NO: 27020 - RNA, 21 nt, synthetic construct
  source 1..21: mol_type = other RNA
agcagcttacaaaagaatgta

SEQ ID NO: 27021 - RNA, 21 nt, synthetic construct
  source 1..21: mol_type = other RNA
agcagctttatgatatgacta

SEQ ID NO: 27022 - RNA, 21 nt, synthetic construct
  source 1..21: mol_type = other RNA
agcaggaacaagcccttccta

SEQ ID NO: 27023 - RNA, 21 nt, synthetic construct
  source 1..21: mol_type = other RNA
agcaggacttacaaacaaagg

SEQ ID NO: 27024 - RNA, 21 nt, synthetic construct
  source 1..21: mol_type = other RNA
agcagggagcagcagcagcac

SEQ ID NO: 27025 - RNA, 21 nt, synthetic construct
  source 1..21: mol_type = other RNA
agcaggtgccactaatctgat

SEQ ID NO: 27026 - RNA, 21 nt, synthetic construct
  source 1..21: mol_type = other RNA
agcatcctataatcctggact

SEQ ID NO: 27027 - RNA, 21 nt, synthetic construct
  source 1..21: mol_type = other RNA
agcatggtttctgaaccagta

SEQ ID NO: 27028 - RNA, 21 nt, synthetic construct
  source 1..21: mol_type = other RNA
agccagaaagtactggagaag

SEQ ID NO: 27029 - RNA, 21 nt, synthetic construct
  source 1..21: mol_type = other RNA
agccagtaggtaagaagtgtt

SEQ ID NO: 27030 - RNA, 21 nt, synthetic construct
  source 1..21: mol_type = other RNA
agcccttcctactagcctcag

SEQ ID NO: 27031 - RNA, 21 nt, synthetic construct
  source 1..21: mol_type = other RNA
agcctattctgccagccttat

SEQ ID NO: 27032 - RNA, 21 nt, synthetic construct
  source 1..21: mol_type = other RNA
agcctcagataccaatccagc

SEQ ID NO: 27033 - RNA, 21 nt, synthetic construct
  source 1..21: mol_type = other RNA
agccttatttctaaccatttt

SEQ ID NO: 27034 - RNA, 21 nt, synthetic construct
  source 1..21: mol_type = other RNA
agctacccagcaggaacaagc

SEQ ID NO: 27035 - RNA, 21 nt, synthetic construct
  source 1..21: mol_type = other RNA
agctagaggaagccagtaggt

SEQ ID NO: 27036 - RNA, 21 nt, synthetic construct
  source 1..21: mol_type = other RNA
agctctaaacaatgtattcat

SEQ ID NO: 27037 - RNA, 21 nt, synthetic construct
  source 1..21: mol_type = other RNA
agctgccacaaaagctagagg

SEQ ID NO: 27038 - RNA, 21 nt, synthetic construct
  source 1..21: mol_type = other RNA
agctgctgaaagttgtgtatg

SEQ ID NO: 27039 - RNA, 21 nt, synthetic construct
  source 1..21: mol_type = other RNA
agctgctttgatataaaaaag

SEQ ID NO: 27040 - RNA, 21 nt, synthetic construct
  source 1..21: mol_type = other RNA
agcttcaggtatatttagcac

SEQ ID NO: 27041 - RNA, 21 nt, synthetic construct
  source 1..21: mol_type = other RNA
agctttatgatatgactactc

SEQ ID NO: 27042 - RNA, 21 nt, synthetic construct
  source 1..21: mol_type = other RNA
agcttttgtggcagcttcagg

SEQ ID NO: 27043 - RNA, 21 nt, synthetic construct
  source 1..21: mol_type = other RNA
aggaacaagcccttcctacta

SEQ ID NO: 27044 - RNA, 21 nt, synthetic construct
  source 1..21: mol_type = other RNA
aggaacagcagcctattctgc

SEQ ID NO: 27045 - RNA, 21 nt, synthetic construct
  source 1..21: mol_type = other RNA
aggaagacattaagttttact

SEQ ID NO: 27046 - RNA, 21 nt, synthetic construct
  source 1..21: mol_type = other RNA
aggaagccagtaggtaagaag

SEQ ID NO: 27047 - RNA, 21 nt, synthetic construct
  source 1..21: mol_type = other RNA
aggaagggcttgttcctgctg

SEQ ID NO: 27048 - RNA, 21 nt, synthetic construct
  source 1..21: mol_type = other RNA
aggacagcaggacttacaaac

SEQ ID NO: 27049 - RNA, 21 nt, synthetic construct
  source 1..21: mol_type = other RNA
aggacttacaaacaaaggcct

SEQ ID NO: 27050 - RNA, 21 nt, synthetic construct
  source 1..21: mol_type = other RNA
aggatgctaggacagcaggac

SEQ ID NO: 27051 - RNA, 21 nt, synthetic construct
  source 1..21: mol_type = other RNA
aggattataggatgctaggac

SEQ ID NO: 27052 - RNA, 21 nt, synthetic construct
  source 1..21: mol_type = other RNA
aggcctataccttcttgagat

SEQ ID NO: 27053 - RNA, 21 nt, synthetic construct
  source 1..21: mol_type = other RNA
aggcctttgtttgtaagtcct

SEQ ID NO: 27054 - RNA, 21 nt, synthetic construct
  source 1..21: mol_type = other RNA
aggctagtaggaagggcttgt

SEQ ID NO: 27055 - RNA, 21 nt, synthetic construct
  source 1..21: mol_type = other RNA
aggctgctgttcctacccatg

SEQ ID NO: 27056 - RNA, 21 nt, synthetic construct
  source 1..21: mol_type = other RNA
aggctggcagaataggctgct

SEQ ID NO: 27057 - RNA, 21 nt, synthetic construct
  source 1..21: mol_type = other RNA
agggaaactactggttcagaa

SEQ ID NO: 27058 - RNA, 21 nt, synthetic construct
  source 1..21: mol_type = other RNA
agggaatgttcttaaagatca

SEQ ID NO: 27059 - RNA, 21 nt, synthetic construct
  source 1..21: mol_type = other RNA
agggagcagcagcagcacttg

SEQ ID NO: 27060 - RNA, 21 nt, synthetic construct
  source 1..21: mol_type = other RNA
agggcttgttcctgctgggta

SEQ ID NO: 27061 - RNA, 21 nt, synthetic construct
  source 1..21: mol_type = other RNA
agggtagtatggccatagacc

SEQ ID NO: 27062 - RNA, 21 nt, synthetic construct
  source 1..21: mol_type = other RNA
aggtaagaagtgttaagagtg

SEQ ID NO: 27063 - RNA, 21 nt, synthetic construct
  source 1..21: mol_type = other RNA
aggtataggcctttgtttgta

SEQ ID NO: 27064 - RNA, 21 nt, synthetic construct
  source 1..21: mol_type = other RNA
aggtatatttagcactgaacg

SEQ ID NO: 27065 - RNA, 21 nt, synthetic construct
  source 1..21: mol_type = other RNA
aggtctatggccatactaccc

SEQ ID NO: 27066 - RNA, 21 nt, synthetic construct
  source 1..21: mol_type = other RNA
aggtgccactaatctgatctt

SEQ ID NO: 27067 - RNA, 21 nt, synthetic construct
  source 1..21: mol_type = other RNA
agtaaaacttaatgtcttcct

SEQ ID NO: 27068 - RNA, 21 nt, synthetic construct
  source 1..21: mol_type = other RNA
agtactggagaagtccaggat

SEQ ID NO: 27069 - RNA, 21 nt, synthetic construct
  source 1..21: mol_type = other RNA
agtactttctggctggattgg

SEQ ID NO: 27070 - RNA, 21 nt, synthetic construct
  source 1..21: mol_type = other RNA
agtaggaagggcttgttcctg

SEQ ID NO: 27071 - RNA, 21 nt, synthetic construct
  source 1..21: mol_type = other RNA
agtaggtaagaagtgttaaga

SEQ ID NO: 27072 - RNA, 21 nt, synthetic construct
  source 1..21: mol_type = other RNA
agtagtcatatcataaagctg

SEQ ID NO: 27073 - RNA, 21 nt, synthetic construct
  source 1..21: mol_type = other RNA
agtagtttccctgcagttgag

SEQ ID NO: 27074 - RNA, 21 nt, synthetic construct
  source 1..21: mol_type = other RNA
agtatctcagcaggtgccact

SEQ ID NO: 27075 - RNA, 21 nt, synthetic construct
  source 1..21: mol_type = other RNA
agtatggccatagaccttttt

SEQ ID NO: 27076 - RNA, 21 nt, synthetic construct
  source 1..21: mol_type = other RNA
agtcatatcataaagctgctt

SEQ ID NO: 27077 - RNA, 21 nt, synthetic construct
  source 1..21: mol_type = other RNA
agtccaggattataggatgct

SEQ ID NO: 27078 - RNA, 21 nt, synthetic construct
  source 1..21: mol_type = other RNA
agtcccatcccatctgatata

SEQ ID NO: 27079 - RNA, 21 nt, synthetic construct
  source 1..21: mol_type = other RNA
agtcctgctgtcctagcatcc

SEQ ID NO: 27080 - RNA, 21 nt, synthetic construct
  source 1..21: mol_type = other RNA
agtcttacattcttttgtaag

SEQ ID NO: 27081 - RNA, 21 nt, synthetic construct
  source 1..21: mol_type = other RNA
agtgctaaatatacctgaagc

SEQ ID NO: 27082 - RNA, 21 nt, synthetic construct
  source 1..21: mol_type = other RNA
agtgctgctgctgctccctgc

SEQ ID NO: 27083 - RNA, 21 nt, synthetic construct
  source 1..21: mol_type = other RNA
agtggcacctgctgagatact

SEQ ID NO: 27084 - RNA, 21 nt, synthetic construct
  source 1..21: mol_type = other RNA
agtgtatatgtatttgtgcaa

SEQ ID NO: 27085 - RNA, 21 nt, synthetic construct
  source 1..21: mol_type = other RNA
agtgttaagagtgtatatgta

SEQ ID NO: 27086 - RNA, 21 nt, synthetic construct
  source 1..21: mol_type = other RNA
agttgagcagggagcagcagc

SEQ ID NO: 27087 - RNA, 21 nt, synthetic construct
  source 1..21: mol_type = other RNA
agttgtgtatgagtagtcata

SEQ ID NO: 27088 - RNA, 21 nt, synthetic construct
  source 1..21: mol_type = other RNA
agtttccctgcagttgagcag

SEQ ID NO: 27089 - RNA, 21 nt, synthetic construct
  source 1..21: mol_type = other RNA
ataaaaaaggtctatggccat

SEQ ID NO: 27090 - RNA, 21 nt, synthetic construct
  source 1..21: mol_type = other RNA
ataaacaatctgcatattggg

SEQ ID NO: 27091 - RNA, 21 nt, synthetic construct
  source 1..21: mol_type = other RNA
ataaggctggcagaataggct

SEQ ID NO: 27092 - RNA, 21 nt, synthetic construct
  source 1..21: mol_type = other RNA
ataatcctggacttctccagt

SEQ ID NO: 27093 - RNA, 21 nt, synthetic construct
  source 1..21: mol_type = other RNA
atacacaactttcagcagctt

SEQ ID NO: 27094 - RNA, 21 nt, synthetic construct
  source 1..21: mol_type = other RNA
atacactcttaacacttctta

SEQ ID NO: 27095 - RNA, 21 nt, synthetic construct
  source 1..21: mol_type = other RNA
atacatatacactcttaacac

SEQ ID NO: 27096 - RNA, 21 nt, synthetic construct
  source 1..21: mol_type = other RNA
atacattgtttagagctaccc

SEQ ID NO: 27097 - RNA, 21 nt, synthetic construct
  source 1..21: mol_type = other RNA
ataccaatccagccagaaagt

SEQ ID NO: 27098 - RNA, 21 nt, synthetic construct
  source 1..21: mol_type = other RNA
ataccatgtactaacaaatgt

SEQ ID NO: 27099 - RNA, 21 nt, synthetic construct
  source 1..21: mol_type = other RNA
atacctgaagctgccacaaaa

SEQ ID NO: 27100 - RNA, 21 nt, synthetic construct
  source 1..21: mol_type = other RNA
ataccttcttgagatgttcgt

SEQ ID NO: 27101 - RNA, 21 nt, synthetic construct
  source 1..21: mol_type = other RNA
atactaccctgaatgagtccc

SEQ ID NO: 27102 - RNA, 21 nt, synthetic construct
  source 1..21: mol_type = other RNA
atactgatgcacagcatggtt

SEQ ID NO: 27103 - RNA, 21 nt, synthetic construct
  source 1..21: mol_type = other RNA
ataggatgctaggacagcagg

SEQ ID NO: 27104 - RNA, 21 nt, synthetic construct
  source 1..21: mol_type = other RNA
ataggcctttgtttgtaagtc

SEQ ID NO: 27105 - RNA, 21 nt, synthetic construct
  source 1..21: mol_type = other RNA
ataggctgctgttcctaccca

SEQ ID NO: 27106 - RNA, 21 nt, synthetic construct
  source 1..21: mol_type = other RNA
atataaaaaaggtctatggcc

SEQ ID NO: 27107 - RNA, 21 nt, synthetic construct
  source 1..21: mol_type = other RNA
atatacactcttaacacttct

SEQ ID NO: 27108 - RNA, 21 nt, synthetic construct
  source 1..21: mol_type = other RNA
atatacctgaagctgccacaa

SEQ ID NO: 27109 - RNA, 21 nt, synthetic construct
  source 1..21: mol_type = other RNA
atatcaaagcagctttatgat

SEQ ID NO: 27110 - RNA, 21 nt, synthetic construct
  source 1..21: mol_type = other RNA
atatcagatgggatgggactc

SEQ ID NO: 27111 - RNA, 21 nt, synthetic construct
  source 1..21: mol_type = other RNA
atatcataaagctgctttgat

SEQ ID NO: 27112 - RNA, 21 nt, synthetic construct
  source 1..21: mol_type = other RNA
atatgactactcatacacaac

SEQ ID NO: 27113 - RNA, 21 nt, synthetic construct
  source 1..21: mol_type = other RNA
atatgtatttgtgcaagtgct

SEQ ID NO: 27114 - RNA, 21 nt, synthetic construct
  source 1..21: mol_type = other RNA
atattgggattgtcagggaat

SEQ ID NO: 27115 - RNA, 21 nt, synthetic construct
  source 1..21: mol_type = other RNA
atatttagcactgaacgaaca

SEQ ID NO: 27116 - RNA, 21 nt, synthetic construct
  source 1..21: mol_type = other RNA
atcaaagcagctttatgatat

SEQ ID NO: 27117 - RNA, 21 nt, synthetic construct
  source 1..21: mol_type = other RNA
atcagatgggatgggactcat

SEQ ID NO: 27118 - RNA, 21 nt, synthetic construct
  source 1..21: mol_type = other RNA
atcagattagtggcacctgct

SEQ ID NO: 27119 - RNA, 21 nt, synthetic construct
  source 1..21: mol_type = other RNA
atcagtatctcagcaggtgcc

SEQ ID NO: 27120 - RNA, 21 nt, synthetic construct
  source 1..21: mol_type = other RNA
atcataaagctgctttgatat

SEQ ID NO: 27121 - RNA, 21 nt, synthetic construct
  source 1..21: mol_type = other RNA
atccagccagaaagtactgga

SEQ ID NO: 27122 - RNA, 21 nt, synthetic construct
  source 1..21: mol_type = other RNA
atcccaatatgcagattgttt

SEQ ID NO: 27123 - RNA, 21 nt, synthetic construct
  source 1..21: mol_type = other RNA
atcccatctgatataaacaat

SEQ ID NO: 27124 - RNA, 21 nt, synthetic construct
  source 1..21: mol_type = other RNA
atcctataatcctggacttct

SEQ ID NO: 27125 - RNA, 21 nt, synthetic construct
  source 1..21: mol_type = other RNA
atcctggacttctccagtact

SEQ ID NO: 27126 - RNA, 21 nt, synthetic construct
  source 1..21: mol_type = other RNA
atctcaagaaggtataggcct

SEQ ID NO: 27127 - RNA, 21 nt, synthetic construct
  source 1..21: mol_type = other RNA
atctcagcaggtgccactaat

SEQ ID NO: 27128 - RNA, 21 nt, synthetic construct
  source 1..21: mol_type = other RNA
atctgaggctagtaggaaggg

SEQ ID NO: 27129 - RNA, 21 nt, synthetic construct
  source 1..21: mol_type = other RNA
atctgatataaacaatctgca

SEQ ID NO: 27130 - RNA, 21 nt, synthetic construct
  source 1..21: mol_type = other RNA
atctgatctttaagaacattc

SEQ ID NO: 27131 - RNA, 21 nt, synthetic construct
  source 1..21: mol_type = other RNA
atctgcatattgggattgtca

SEQ ID NO: 27132 - RNA, 21 nt, synthetic construct
  source 1..21: mol_type = other RNA
atctttaagaacattccctga

SEQ ID NO: 27133 - RNA, 21 nt, synthetic construct
  source 1..21: mol_type = other RNA
atgaaaaagacagtggagaaa

SEQ ID NO: 27134 - RNA, 21 nt, synthetic construct
  source 1..21: mol_type = other RNA
atgaatacattgtttagagct

SEQ ID NO: 27135 - RNA, 21 nt, synthetic construct
  source 1..21: mol_type = other RNA
atgactactcatacacaactt

SEQ ID NO: 27136 - RNA, 21 nt, synthetic construct
  source 1..21: mol_type = other RNA
atgagtagtcatatcataaag

SEQ ID NO: 27137 - RNA, 21 nt, synthetic construct
  source 1..21: mol_type = other RNA
atgagtcccatcccatctgat

SEQ ID NO: 27138 - RNA, 21 nt, synthetic construct
  source 1..21: mol_type = other RNA
atgatatgactactcatacac

SEQ ID NO: 27139 - RNA, 21 nt, synthetic construct
  source 1..21: mol_type = other RNA
atgcacagcatggtttctgaa

SEQ ID NO: 27140 - RNA, 21 nt, synthetic construct
  source 1..21: mol_type = other RNA
atgcagattgtttatatcaga

SEQ ID NO: 27141 - RNA, 21 nt, synthetic construct
  source 1..21: mol_type = other RNA
atgctaggacagcaggactta

SEQ ID NO: 27142 - RNA, 21 nt, synthetic construct
  source 1..21: mol_type = other RNA
atgctgtgcatcagtatctca

SEQ ID NO: 27143 - RNA, 21 nt, synthetic construct
  source 1..21: mol_type = other RNA
atggccatactaccctgaatg

SEQ ID NO: 27144 - RNA, 21 nt, synthetic construct
  source 1..21: mol_type = other RNA
atggccatagaccttttttat

SEQ ID NO: 27145 - RNA, 21 nt, synthetic construct
  source 1..21: mol_type = other RNA
atgggactcattcagggtagt

SEQ ID NO: 27146 - RNA, 21 nt, synthetic construct
  source 1..21: mol_type = other RNA
atgggatgggactcattcagg

SEQ ID NO: 27147 - RNA, 21 nt, synthetic construct
  source 1..21: mol_type = other RNA
atgggtaggaacagcagccta

SEQ ID NO: 27148 - RNA, 21 nt, synthetic construct
  source 1..21: mol_type = other RNA
atggttagaaataaggctggc

SEQ ID NO: 27149 - RNA, 21 nt, synthetic construct
  source 1..21: mol_type = other RNA
atggtttctgaaccagtagtt

SEQ ID NO: 27150 - RNA, 21 nt, synthetic construct
  source 1..21: mol_type = other RNA
atgtattcatgggtaggaaca

SEQ ID NO: 27151 - RNA, 21 nt, synthetic construct
  source 1..21: mol_type = other RNA
atgtatttgtgcaagtgctgc

SEQ ID NO: 27152 - RNA, 21 nt, synthetic construct
  source 1..21: mol_type = other RNA
atgttcgttcagtgctaaata

SEQ ID NO: 27153 - RNA, 21 nt, synthetic construct
  source 1..21: mol_type = other RNA
attagtggcacctgctgagat

SEQ ID NO: 27154 - RNA, 21 nt, synthetic construct
  source 1..21: mol_type = other RNA
attataggatgctaggacagc

SEQ ID NO: 27155 - RNA, 21 nt, synthetic construct
  source 1..21: mol_type = other RNA
attcagggtagtatggccata

SEQ ID NO: 27156 - RNA, 21 nt, synthetic construct
  source 1..21: mol_type = other RNA
attcatgggtaggaacagcag

SEQ ID NO: 27157 - RNA, 21 nt, synthetic construct
  source 1..21: mol_type = other RNA
attccctgacaatcccaatat

SEQ ID NO: 27158 - RNA, 21 nt, synthetic construct
  source 1..21: mol_type = other RNA
attctgccagccttatttcta

SEQ ID NO: 27159 - RNA, 21 nt, synthetic construct
  source 1..21: mol_type = other RNA
attcttttgtaagctgctgaa

SEQ ID NO: 27160 - RNA, 21 nt, synthetic construct
  source 1..21: mol_type = other RNA
attgggattgtcagggaatgt

SEQ ID NO: 27161 - RNA, 21 nt, synthetic construct
  source 1..21: mol_type = other RNA
attggtatctgaggctagtag

SEQ ID NO: 27162 - RNA, 21 nt, synthetic construct
  source 1..21: mol_type = other RNA
attgtcagggaatgttcttaa

SEQ ID NO: 27163 - RNA, 21 nt, synthetic construct
  source 1..21: mol_type = other RNA
attgtttagagctacccagca

SEQ ID NO: 27164 - RNA, 21 nt, synthetic construct
  source 1..21: mol_type = other RNA
attgtttatatcagatgggat

SEQ ID NO: 27165 - RNA, 21 nt, synthetic construct
  source 1..21: mol_type = other RNA
atttagcactgaacgaacatc

SEQ ID NO: 27166 - RNA, 21 nt, synthetic construct
  source 1..21: mol_type = other RNA
atttgtgcaagtgctgctgct

SEQ ID NO: 27167 - RNA, 21 nt, synthetic construct
  source 1..21: mol_type = other RNA
caaaagctagaggaagccagt

SEQ ID NO: 27168 - RNA, 21 nt, synthetic construct
  source 1..21: mol_type = other RNA
caaacaaaggcctataccttc

SEQ ID NO: 27169 - RNA, 21 nt, synthetic construct
  source 1..21: mol_type = other RNA
caaagcagctttatgatatga

SEQ ID NO: 27170 - RNA, 21 nt, synthetic construct
  source 1..21: mol_type = other RNA
caaaggcctataccttcttga

SEQ ID NO: 27171 - RNA, 21 nt, synthetic construct
  source 1..21: mol_type = other RNA
caaatgtctaaaatggttaga

SEQ ID NO: 27172 - RNA, 21 nt, synthetic construct
  source 1..21: mol_type = other RNA
caactgcagggaaactactgg

SEQ ID NO: 27173 - RNA, 21 nt, synthetic construct
  source 1..21: mol_type = other RNA
caactttcagcagcttacaaa

SEQ ID NO: 27174 - RNA, 21 nt, synthetic construct
  source 1..21: mol_type = other RNA
caagaaggtataggcctttgt

SEQ ID NO: 27175 - RNA, 21 nt, synthetic construct
  source 1..21: mol_type = other RNA
caagcccttcctactagcctc

SEQ ID NO: 27176 - RNA, 21 nt, synthetic construct
  source 1..21: mol_type = other RNA
caagtgctgctgctgctccct

SEQ ID NO: 27177 - RNA, 21 nt, synthetic construct
  source 1..21: mol_type = other RNA
caatccagccagaaagtactg

SEQ ID NO: 27178 - RNA, 21 nt, synthetic construct
  source 1..21: mol_type = other RNA
caatcccaatatgcagattgt

SEQ ID NO: 27179 - RNA, 21 nt, synthetic construct
  source 1..21: mol_type = other RNA
caatctgcatattgggattgt

SEQ ID NO: 27180 - RNA, 21 nt, synthetic construct
  source 1..21: mol_type = other RNA
caatgtattcatgggtaggaa

SEQ ID NO: 27181 - RNA, 21 nt, synthetic construct
  source 1..21: mol_type = other RNA
cacaaaagctagaggaagcca

SEQ ID NO: 27182 - RNA, 21 nt, synthetic construct
  source 1..21: mol_type = other RNA
cacaaatacatatacactctt

SEQ ID NO: 27183 - RNA, 21 nt, synthetic construct
  source 1..21: mol_type = other RNA
cacaactttcagcagcttaca

SEQ ID NO: 27184 - RNA, 21 nt, synthetic construct
  source 1..21: mol_type = other RNA
cacagcatggtttctgaacca

SEQ ID NO: 27185 - RNA, 21 nt, synthetic construct
  source 1..21: mol_type = other RNA
cacctgctgagatactgatgc

SEQ ID NO: 27186 - RNA, 21 nt, synthetic construct
  source 1..21: mol_type = other RNA
cactaatctgatctttaagaa

SEQ ID NO: 27187 - RNA, 21 nt, synthetic construct
  source 1..21: mol_type = other RNA
cactcttaacacttcttacct

SEQ ID NO: 27188 - RNA, 21 nt, synthetic construct
  source 1..21: mol_type = other RNA
cactgaacgaacatctcaaga

SEQ ID NO: 27189 - RNA, 21 nt, synthetic construct
  source 1..21: mol_type = other RNA
cacttcttacctactggcttc

SEQ ID NO: 27190 - RNA, 21 nt, synthetic construct
  source 1..21: mol_type = other RNA
cacttgcacaaatacatatac

SEQ ID NO: 27191 - RNA, 21 nt, synthetic construct
  source 1..21: mol_type = other RNA
cagaaaccatgctgtgcatca

SEQ ID NO: 27192 - RNA, 21 nt, synthetic construct
  source 1..21: mol_type = other RNA
cagaaagtactggagaagtcc

SEQ ID NO: 27193 - RNA, 21 nt, synthetic construct
  source 1..21: mol_type = other RNA
cagaataggctgctgttccta

SEQ ID NO: 27194 - RNA, 21 nt, synthetic construct
  source 1..21: mol_type = other RNA
cagataccaatccagccagaa

SEQ ID NO: 27195 - RNA, 21 nt, synthetic construct
  source 1..21: mol_type = other RNA
cagatgggatgggactcattc

SEQ ID NO: 27196 - RNA, 21 nt, synthetic construct
  source 1..21: mol_type = other RNA
cagattagtggcacctgctga

SEQ ID NO: 27197 - RNA, 21 nt, synthetic construct
  source 1..21: mol_type = other RNA
cagattgtttatatcagatgg

SEQ ID NO: 27198 - RNA, 21 nt, synthetic construct
  source 1..21: mol_type = other RNA
cagcacttgcacaaatacata

SEQ ID NO: 27199 - RNA, 21 nt, synthetic construct
  source 1..21: mol_type = other RNA
cagcagcacttgcacaaatac

SEQ ID NO: 27200 - RNA, 21 nt, synthetic construct
  source 1..21: mol_type = other RNA
cagcagcagcacttgcacaaa

SEQ ID NO: 27201 - RNA, 21 nt, synthetic construct
  source 1..21: mol_type = other RNA
cagcagcctattctgccagcc

SEQ ID NO: 27202 - RNA, 21 nt, synthetic construct
  source 1..21: mol_type = other RNA
cagcagcttacaaaagaatgt

SEQ ID NO: 27203 - RNA, 21 nt, synthetic construct
  source 1..21: mol_type = other RNA
cagcaggaacaagcccttcct

SEQ ID NO: 27204 - RNA, 21 nt, synthetic construct
  source 1..21: mol_type = other RNA
cagcaggacttacaaacaaag

SEQ ID NO: 27205 - RNA, 21 nt, synthetic construct
  source 1..21: mol_type = other RNA
cagcaggtgccactaatctga

SEQ ID NO: 27206 - RNA, 21 nt, synthetic construct
  source 1..21: mol_type = other RNA
cagcatggtttctgaaccagt

SEQ ID NO: 27207 - RNA, 21 nt, synthetic construct
  source 1..21: mol_type = other RNA
cagccagaaagtactggagaa

SEQ ID NO: 27208 - RNA, 21 nt, synthetic construct
  source 1..21: mol_type = other RNA
cagcctattctgccagcctta

SEQ ID NO: 27209 - RNA, 21 nt, synthetic construct
  source 1..21: mol_type = other RNA
cagccttatttctaaccattt

SEQ ID NO: 27210 - RNA, 21 nt, synthetic construct
  source 1..21: mol_type = other RNA
cagcttcaggtatatttagca

SEQ ID NO: 27211 - RNA, 21 nt, synthetic construct
  source 1..21: mol_type = other RNA
cagctttatgatatgactact

SEQ ID NO: 27212 - RNA, 21 nt, synthetic construct
  source 1..21: mol_type = other RNA
caggaacaagcccttcctact

SEQ ID NO: 27213 - RNA, 21 nt, synthetic construct
  source 1..21: mol_type = other RNA
caggacttacaaacaaaggcc

SEQ ID NO: 27214 - RNA, 21 nt, synthetic construct
  source 1..21: mol_type = other RNA
caggattataggatgctagga

SEQ ID NO: 27215 - RNA, 21 nt, synthetic construct
  source 1..21: mol_type = other RNA
cagggaaactactggttcaga

SEQ ID NO: 27216 - RNA, 21 nt, synthetic construct
  source 1..21: mol_type = other RNA
cagggaatgttcttaaagatc

SEQ ID NO: 27217 - RNA, 21 nt, synthetic construct
  source 1..21: mol_type = other RNA
cagggagcagcagcagcactt

SEQ ID NO: 27218 - RNA, 21 nt, synthetic construct
  source 1..21: mol_type = other RNA
cagggtagtatggccatagac

SEQ ID NO: 27219 - RNA, 21 nt, synthetic construct
  source 1..21: mol_type = other RNA
caggtatatttagcactgaac

SEQ ID NO: 27220 - RNA, 21 nt, synthetic construct
  source 1..21: mol_type = other RNA
caggtgccactaatctgatct

SEQ ID NO: 27221 - RNA, 21 nt, synthetic construct
  source 1..21: mol_type = other RNA
cagtactttctggctggattg

SEQ ID NO: 27222 - RNA, 21 nt, synthetic construct
  source 1..21: mol_type = other RNA
cagtaggtaagaagtgttaag

SEQ ID NO: 27223 - RNA, 21 nt, synthetic construct
  source 1..21: mol_type = other RNA
cagtagtttccctgcagttga

SEQ ID NO: 27224 - RNA, 21 nt, synthetic construct
  source 1..21: mol_type = other RNA
cagtatctcagcaggtgccac

SEQ ID NO: 27225 - RNA, 21 nt, synthetic construct
  source 1..21: mol_type = other RNA
cagtgctaaatatacctgaag

SEQ ID NO: 27226 - RNA, 21 nt, synthetic construct
  source 1..21: mol_type = other RNA
cagttgagcagggagcagcag

SEQ ID NO: 27227 - RNA, 21 nt, synthetic construct
  source 1..21: mol_type = other RNA
cataaagctgctttgatataa

SEQ ID NO: 27228 - RNA, 21 nt, synthetic construct
  source 1..21: mol_type = other RNA
catacacaactttcagcagct

SEQ ID NO: 27229 - RNA, 21 nt, synthetic construct
  source 1..21: mol_type = other RNA
catactaccctgaatgagtcc

SEQ ID NO: 27230 - RNA, 21 nt, synthetic construct
  source 1..21: mol_type = other RNA
catatacactcttaacacttc

SEQ ID NO: 27231 - RNA, 21 nt, synthetic construct
  source 1..21: mol_type = other RNA
catatcataaagctgctttga

SEQ ID NO: 27232 - RNA, 21 nt, synthetic construct
  source 1..21: mol_type = other RNA
catattgggattgtcagggaa

SEQ ID NO: 27233 - RNA, 21 nt, synthetic construct
  source 1..21: mol_type = other RNA
catcagtatctcagcaggtgc

SEQ ID NO: 27234 - RNA, 21 nt, synthetic construct
  source 1..21: mol_type = other RNA
catcccatctgatataaacaa

SEQ ID NO: 27235 - RNA, 21 nt, synthetic construct
  source 1..21: mol_type = other RNA
catcctataatcctggacttc

SEQ ID NO: 27236 - RNA, 21 nt, synthetic construct
  source 1..21: mol_type = other RNA
catctcaagaaggtataggcc

SEQ ID NO: 27237 - RNA, 21 nt, synthetic construct
  source 1..21: mol_type = other RNA
catctgatataaacaatctgc

SEQ ID NO: 27238 - RNA, 21 nt, synthetic construct
  source 1..21: mol_type = other RNA
catgaatacattgtttagagc

SEQ ID NO: 27239 - RNA, 21 nt, synthetic construct
  source 1..21: mol_type = other RNA
catgctgtgcatcagtatctc

SEQ ID NO: 27240 - RNA, 21 nt, synthetic construct
  source 1..21: mol_type = other RNA
catgggtaggaacagcagcct

SEQ ID NO: 27241 - RNA, 21 nt, synthetic construct
  source 1..21: mol_type = other RNA
catggtttctgaaccagtagt

SEQ ID NO: 27242 - RNA, 21 nt, synthetic construct
  source 1..21: mol_type = other RNA
catgtactaacaaatgtctaa

SEQ ID NO: 27243 - RNA, 21 nt, synthetic construct
  source 1..21: mol_type = other RNA
cattcagggtagtatggccat

SEQ ID NO: 27244 - RNA, 21 nt, synthetic construct
  source 1..21: mol_type = other RNA
cattccctgacaatcccaata

SEQ ID NO: 27245 - RNA, 21 nt, synthetic construct
  source 1..21: mol_type = other RNA
cattcttttgtaagctgctga

SEQ ID NO: 27246 - RNA, 21 nt, synthetic construct
  source 1..21: mol_type = other RNA
cattgtttagagctacccagc

SEQ ID NO: 27247 - RNA, 21 nt, synthetic construct
  source 1..21: mol_type = other RNA
catttgttagtacatggtatt

SEQ ID NO: 27248 - RNA, 21 nt, synthetic construct
  source 1..21: mol_type = other RNA
ccaatatgcagattgtttata

SEQ ID NO: 27249 - RNA, 21 nt, synthetic construct
  source 1..21: mol_type = other RNA
ccaatccagccagaaagtact

SEQ ID NO: 27250 - RNA, 21 nt, synthetic construct
  source 1..21: mol_type = other RNA
ccacaaaagctagaggaagcc

SEQ ID NO: 27251 - RNA, 21 nt, synthetic construct
  source 1..21: mol_type = other RNA
ccactaatctgatctttaaga

SEQ ID NO: 27252 - RNA, 21 nt, synthetic construct
  source 1..21: mol_type = other RNA
ccagaaagtactggagaagtc

SEQ ID NO: 27253 - RNA, 21 nt, synthetic construct
  source 1..21: mol_type = other RNA
ccagcaggaacaagcccttcc

SEQ ID NO: 27254 - RNA, 21 nt, synthetic construct
  source 1..21: mol_type = other RNA
ccagccagaaagtactggaga

SEQ ID NO: 27255 - RNA, 21 nt, synthetic construct
  source 1..21: mol_type = other RNA
ccagccttatttctaaccatt

SEQ ID NO: 27256 - RNA, 21 nt, synthetic construct
  source 1..21: mol_type = other RNA
ccaggattataggatgctagg

SEQ ID NO: 27257 - RNA, 21 nt, synthetic construct
  source 1..21: mol_type = other RNA
ccagtactttctggctggatt

SEQ ID NO: 27258 - RNA, 21 nt, synthetic construct
  source 1..21: mol_type = other RNA
ccagtaggtaagaagtgttaa

SEQ ID NO: 27259 - RNA, 21 nt, synthetic construct
  source 1..21: mol_type = other RNA
ccagtagtttccctgcagttg

SEQ ID NO: 27260 - RNA, 21 nt, synthetic construct
  source 1..21: mol_type = other RNA
ccatactaccctgaatgagtc

SEQ ID NO: 27261 - RNA, 21 nt, synthetic construct
  source 1..21: mol_type = other RNA
ccatagaccttttttatatca

SEQ ID NO: 27262 - RNA, 21 nt, synthetic construct
  source 1..21: mol_type = other RNA
ccatcccatctgatataaaca

SEQ ID NO: 27263 - RNA, 21 nt, synthetic construct
  source 1..21: mol_type = other RNA
ccatctgatataaacaatctg

SEQ ID NO: 27264 - RNA, 21 nt, synthetic construct
  source 1..21: mol_type = other RNA
ccatgaatacattgtttagag

SEQ ID NO: 27265 - RNA, 21 nt, synthetic construct
  source 1..21: mol_type = other RNA
ccatgctgtgcatcagtatct

SEQ ID NO: 27266 - RNA, 21 nt, synthetic construct
  source 1..21: mol_type = other RNA
ccatgtactaacaaatgtcta

SEQ ID NO: 27267 - RNA, 21 nt, synthetic construct
  source 1..21: mol_type = other RNA
ccattttagacatttgttagt

SEQ ID NO: 27268 - RNA, 21 nt, synthetic construct
  source 1..21: mol_type = other RNA
cccaatatgcagattgtttat

SEQ ID NO: 27269 - RNA, 21 nt, synthetic construct
  source 1..21: mol_type = other RNA
cccagcaggaacaagcccttc

SEQ ID NO: 27270 - RNA, 21 nt, synthetic construct
  source 1..21: mol_type = other RNA
cccatcccatctgatataaac

SEQ ID NO: 27271 - RNA, 21 nt, synthetic construct
  source 1..21: mol_type = other RNA
cccatctgatataaacaatct

SEQ ID NO: 27272 - RNA, 21 nt, synthetic construct
  source 1..21: mol_type = other RNA
cccatgaatacattgtttaga

SEQ ID NO: 27273 - RNA, 21 nt, synthetic construct
  source 1..21: mol_type = other RNA
ccctgaatgagtcccatccca

SEQ ID NO: 27274 - RNA, 21 nt, synthetic construct
  source 1..21: mol_type = other RNA
ccctgacaatcccaatatgca

SEQ ID NO: 27275 - RNA, 21 nt, synthetic construct
  source 1..21: mol_type = other RNA
ccctgcagttgagcagggagc

SEQ ID NO: 27276 - RNA, 21 nt, synthetic construct
  source 1..21: mol_type = other RNA
ccctgctcaactgcagggaaa

SEQ ID NO: 27277 - RNA, 21 nt, synthetic construct
  source 1..21: mol_type = other RNA
cccttcctactagcctcagat

SEQ ID NO: 27278 - RNA, 21 nt, synthetic construct
  source 1..21: mol_type = other RNA
cctacccatgaatacattgtt

SEQ ID NO: 27279 - RNA, 21 nt, synthetic construct
  source 1..21: mol_type = other RNA
cctactagcctcagataccaa

SEQ ID NO: 27280 - RNA, 21 nt, synthetic construct
  source 1..21: mol_type = other RNA
cctactggcttcctctagctt

SEQ ID NO: 27281 - RNA, 21 nt, synthetic construct
  source 1..21: mol_type = other RNA
cctagcatcctataatcctgg

SEQ ID NO: 27282 - RNA, 21 nt, synthetic construct
  source 1..21: mol_type = other RNA
cctataatcctggacttctcc

SEQ ID NO: 27283 - RNA, 21 nt, synthetic construct
  source 1..21: mol_type = other RNA
cctataccttcttgagatgtt

SEQ ID NO: 27284 - RNA, 21 nt, synthetic construct
  source 1..21: mol_type = other RNA
cctattctgccagccttattt

SEQ ID NO: 27285 - RNA, 21 nt, synthetic construct
  source 1..21: mol_type = other RNA
cctcagataccaatccagcca

SEQ ID NO: 27286 - RNA, 21 nt, synthetic construct
  source 1..21: mol_type = other RNA
cctctagcttttgtggcagct

SEQ ID NO: 27287 - RNA, 21 nt, synthetic construct
  source 1..21: mol_type = other RNA
cctgaagctgccacaaaagct

SEQ ID NO: 27288 - RNA, 21 nt, synthetic construct
  source 1..21: mol_type = other RNA
cctgaatgagtcccatcccat

SEQ ID NO: 27289 - RNA, 21 nt, synthetic construct
  source 1..21: mol_type = other RNA
cctgacaatcccaatatgcag

SEQ ID NO: 27290 - RNA, 21 nt, synthetic construct
  source 1..21: mol_type = other RNA
cctgcagttgagcagggagca

SEQ ID NO: 27291 - RNA, 21 nt, synthetic construct
  source 1..21: mol_type = other RNA
cctgctcaactgcagggaaac

SEQ ID NO: 27292 - RNA, 21 nt, synthetic construct
  source 1..21: mol_type = other RNA
cctgctgagatactgatgcac

SEQ ID NO: 27293 - RNA, 21 nt, synthetic construct
  source 1..21: mol_type = other RNA
cctgctgggtagctctaaaca

SEQ ID NO: 27294 - RNA, 21 nt, synthetic construct
  source 1..21: mol_type = other RNA
cctgctgtcctagcatcctat

SEQ ID NO: 27295 - RNA, 21 nt, synthetic construct
  source 1..21: mol_type = other RNA
cctggacttctccagtacttt

SEQ ID NO: 27296 - RNA, 21 nt, synthetic construct
  source 1..21: mol_type = other RNA
ccttatttctaaccattttag

SEQ ID NO: 27297 - RNA, 21 nt, synthetic construct
  source 1..21: mol_type = other RNA
ccttcctactagcctcagata

SEQ ID NO: 27298 - RNA, 21 nt, synthetic construct
  source 1..21: mol_type = other RNA
ccttcttgagatgttcgttca

SEQ ID NO: 27299 - RNA, 21 nt, synthetic construct
  source 1..21: mol_type = other RNA
cctttgtttgtaagtcctgct

SEQ ID NO: 27300 - RNA, 21 nt, synthetic construct
  source 1..21: mol_type = other RNA
ccttttttatatcaaagcagc

SEQ ID NO: 27301 - RNA, 21 nt, synthetic construct
  source 1..21: mol_type = other RNA
cgaacatctcaagaaggtata

SEQ ID NO: 27302 - RNA, 21 nt, synthetic construct
  source 1..21: mol_type = other RNA
cgttcagtgctaaatatacct

SEQ ID NO: 27303 - RNA, 21 nt, synthetic construct
  source 1..21: mol_type = other RNA
ctaaaatggttagaaataagg

SEQ ID NO: 27304 - RNA, 21 nt, synthetic construct
  source 1..21: mol_type = other RNA
ctaaacaatgtattcatgggt

SEQ ID NO: 27305 - RNA, 21 nt, synthetic construct
  source 1..21: mol_type = other RNA
ctaaatatacctgaagctgcc

SEQ ID NO: 27306 - RNA, 21 nt, synthetic construct
  source 1..21: mol_type = other RNA
ctaacaaatgtctaaaatggt

SEQ ID NO: 27307 - RNA, 21 nt, synthetic construct
  source 1..21: mol_type = other RNA
ctaaccattttagacatttgt

SEQ ID NO: 27308 - RNA, 21 nt, synthetic construct
  source 1..21: mol_type = other RNA
ctaatctgatctttaagaaca

SEQ ID NO: 27309 - RNA, 21 nt, synthetic construct
  source 1..21: mol_type = other RNA
ctacccagcaggaacaagccc

SEQ ID NO: 27310 - RNA, 21 nt, synthetic construct
  source 1..21: mol_type = other RNA
ctacccatgaatacattgttt

SEQ ID NO: 27311 - RNA, 21 nt, synthetic construct
  source 1..21: mol_type = other RNA
ctaccctgaatgagtcccatc

SEQ ID NO: 27312 - RNA, 21 nt, synthetic construct
  source 1..21: mol_type = other RNA
ctactagcctcagataccaat

SEQ ID NO: 27313 - RNA, 21 nt, synthetic construct
  source 1..21: mol_type = other RNA
ctactcatacacaactttcag

SEQ ID NO: 27314 - RNA, 21 nt, synthetic construct
  source 1..21: mol_type = other RNA
ctactggcttcctctagcttt

SEQ ID NO: 27315 - RNA, 21 nt, synthetic construct
  source 1..21: mol_type = other RNA
ctactggttcagaaaccatgc

SEQ ID NO: 27316 - RNA, 21 nt, synthetic construct
  source 1..21: mol_type = other RNA
ctagaggaagccagtaggtaa

SEQ ID NO: 27317 - RNA, 21 nt, synthetic construct
  source 1..21: mol_type = other RNA
ctagcatcctataatcctgga

SEQ ID NO: 27318 - RNA, 21 nt, synthetic construct
  source 1..21: mol_type = other RNA
ctagcctcagataccaatcca

SEQ ID NO: 27319 - RNA, 21 nt, synthetic construct
  source 1..21: mol_type = other RNA
ctagcttttgtggcagcttca

SEQ ID NO: 27320 - RNA, 21 nt, synthetic construct
  source 1..21: mol_type = other RNA
ctaggacagcaggacttacaa

SEQ ID NO: 27321 - RNA, 21 nt, synthetic construct
  source 1..21: mol_type = other RNA
ctagtaggaagggcttgttcc

SEQ ID NO: 27322 - RNA, 21 nt, synthetic construct
  source 1..21: mol_type = other RNA
ctataatcctggacttctcca

SEQ ID NO: 27323 - RNA, 21 nt, synthetic construct
  source 1..21: mol_type = other RNA
ctataccttcttgagatgttc

SEQ ID NO: 27324 - RNA, 21 nt, synthetic construct
  source 1..21: mol_type = other RNA
ctatgaaaaagacagtggaga

SEQ ID NO: 27325 - RNA, 21 nt, synthetic construct
  source 1..21: mol_type = other RNA
ctatggccatactaccctgaa

SEQ ID NO: 27326 - RNA, 21 nt, synthetic construct
  source 1..21: mol_type = other RNA
ctattctgccagccttatttc

SEQ ID NO: 27327 - RNA, 21 nt, synthetic construct
  source 1..21: mol_type = other RNA
ctcaactgcagggaaactact

SEQ ID NO: 27328 - RNA, 21 nt, synthetic construct
  source 1..21: mol_type = other RNA
ctcaagaaggtataggccttt

SEQ ID NO: 27329 - RNA, 21 nt, synthetic construct
  source 1..21: mol_type = other RNA
ctcagataccaatccagccag

SEQ ID NO: 27330 - RNA, 21 nt, synthetic construct
  source 1..21: mol_type = other RNA
ctcagcaggtgccactaatct

SEQ ID NO: 27331 - RNA, 21 nt, synthetic construct
  source 1..21: mol_type = other RNA
ctcatacacaactttcagcag

SEQ ID NO: 27332 - RNA, 21 nt, synthetic construct
  source 1..21: mol_type = other RNA
ctcattcagggtagtatggcc

SEQ ID NO: 27333 - RNA, 21 nt, synthetic construct
  source 1..21: mol_type = other RNA
ctccagtactttctggctgga

SEQ ID NO: 27334 - RNA, 21 nt, synthetic construct
  source 1..21: mol_type = other RNA
ctccctgctcaactgcaggga

SEQ ID NO: 27335 - RNA, 21 nt, synthetic construct
  source 1..21: mol_type = other RNA
ctctaaacaatgtattcatgg

SEQ ID NO: 27336 - RNA, 21 nt, synthetic construct
  source 1..21: mol_type = other RNA
ctctagcttttgtggcagctt

SEQ ID NO: 27337 - RNA, 21 nt, synthetic construct
  source 1..21: mol_type = other RNA
ctcttaacacttcttacctac

SEQ ID NO: 27338 - RNA, 21 nt, synthetic construct
  source 1..21: mol_type = other RNA
ctgaaagttgtgtatgagtag

SEQ ID NO: 27339 - RNA, 21 nt, synthetic construct
  source 1..21: mol_type = other RNA
ctgaaccagtagtttccctgc

SEQ ID NO: 27340 - RNA, 21 nt, synthetic construct
  source 1..21: mol_type = other RNA
ctgaacgaacatctcaagaag

SEQ ID NO: 27341 - RNA, 21 nt, synthetic construct
  source 1..21: mol_type = other RNA
ctgaagctgccacaaaagcta

SEQ ID NO: 27342 - RNA, 21 nt, synthetic construct
  source 1..21: mol_type = other RNA
ctgaatgagtcccatcccatc

SEQ ID NO: 27343 - RNA, 21 nt, synthetic construct
  source 1..21: mol_type = other RNA
ctgacaatcccaatatgcaga

SEQ ID NO: 27344 - RNA, 21 nt, synthetic construct
  source 1..21: mol_type = other RNA
ctgagatactgatgcacagca

SEQ ID NO: 27345 - RNA, 21 nt, synthetic construct
  source 1..21: mol_type = other RNA
ctgaggctagtaggaagggct

SEQ ID NO: 27346 - RNA, 21 nt, synthetic construct
  source 1..21: mol_type = other RNA
ctgatataaacaatctgcata

SEQ ID NO: 27347 - RNA, 21 nt, synthetic construct
  source 1..21: mol_type = other RNA
ctgatctttaagaacattccc

SEQ ID NO: 27348 - RNA, 21 nt, synthetic construct
  source 1..21: mol_type = other RNA
ctgatgcacagcatggtttct

SEQ ID NO: 27349 - RNA, 21 nt, synthetic construct
  source 1..21: mol_type = other RNA
ctgcagggaaactactggttc

SEQ ID NO: 27350 - RNA, 21 nt, synthetic construct
  source 1..21: mol_type = other RNA
ctgcagttgagcagggagcag

SEQ ID NO: 27351 - RNA, 21 nt, synthetic construct
  source 1..21: mol_type = other RNA
ctgcatattgggattgtcagg

SEQ ID NO: 27352 - RNA, 21 nt, synthetic construct
  source 1..21: mol_type = other RNA
ctgccacaaaagctagaggaa

SEQ ID NO: 27353 - RNA, 21 nt, synthetic construct
  source 1..21: mol_type = other RNA
ctgccagccttatttctaacc

SEQ ID NO: 27354 - RNA, 21 nt, synthetic construct
  source 1..21: mol_type = other RNA
ctgctcaactgcagggaaact

SEQ ID NO: 27355 - RNA, 21 nt, synthetic construct
  source 1..21: mol_type = other RNA
ctgctccctgctcaactgcag

SEQ ID NO: 27356 - RNA, 21 nt, synthetic construct
  source 1..21: mol_type = other RNA
ctgctgaaagttgtgtatgag

SEQ ID NO: 27357 - RNA, 21 nt, synthetic construct
  source 1..21: mol_type = other RNA
ctgctgagatactgatgcaca

SEQ ID NO: 27358 - RNA, 21 nt, synthetic construct
  source 1..21: mol_type = other RNA
ctgctgctccctgctcaactg

SEQ ID NO: 27359 - RNA, 21 nt, synthetic construct
  source 1..21: mol_type = other RNA
ctgctgctgctccctgctcaa

SEQ ID NO: 27360 - RNA, 21 nt, synthetic construct
  source 1..21: mol_type = other RNA
ctgctgggtagctctaaacaa

SEQ ID NO: 27361 - RNA, 21 nt, synthetic construct
  source 1..21: mol_type = other RNA
ctgctgtcctagcatcctata

SEQ ID NO: 27362 - RNA, 21 nt, synthetic construct
  source 1..21: mol_type = other RNA
ctgctgttcctacccatgaat

SEQ ID NO: 27363 - RNA, 21 nt, synthetic construct
  source 1..21: mol_type = other RNA
ctgctttgatataaaaaaggt

SEQ ID NO: 27364 - RNA, 21 nt, synthetic construct
  source 1..21: mol_type = other RNA
ctggacttctccagtactttc

SEQ ID NO: 27365 - RNA, 21 nt, synthetic construct
  source 1..21: mol_type = other RNA
ctggagaagtccaggattata

SEQ ID NO: 27366 - RNA, 21 nt, synthetic construct
  source 1..21: mol_type = other RNA
ctggattggtatctgaggcta

SEQ ID NO: 27367 - RNA, 21 nt, synthetic construct
  source 1..21: mol_type = other RNA
ctggcagaataggctgctgtt

SEQ ID NO: 27368 - RNA, 21 nt, synthetic construct
  source 1..21: mol_type = other RNA
ctggctggattggtatctgag

SEQ ID NO: 27369 - RNA, 21 nt, synthetic construct
  source 1..21: mol_type = other RNA
ctggcttcctctagcttttgt

SEQ ID NO: 27370 - RNA, 21 nt, synthetic construct
  source 1..21: mol_type = other RNA
ctgggtagctctaaacaatgt

SEQ ID NO: 27371 - RNA, 21 nt, synthetic construct
  source 1..21: mol_type = other RNA
ctggttcagaaaccatgctgt

SEQ ID NO: 27372 - RNA, 21 nt, synthetic construct
  source 1..21: mol_type = other RNA
ctgtcctagcatcctataatc

SEQ ID NO: 27373 - RNA, 21 nt, synthetic construct
  source 1..21: mol_type = other RNA
ctgtgcatcagtatctcagca

SEQ ID NO: 27374 - RNA, 21 nt, synthetic construct
  source 1..21: mol_type = other RNA
ctgttcctacccatgaataca

SEQ ID NO: 27375 - RNA, 21 nt, synthetic construct
  source 1..21: mol_type = other RNA
cttaaagatcagattagtggc

SEQ ID NO: 27376 - RNA, 21 nt, synthetic construct
  source 1..21: mol_type = other RNA
cttaacacttcttacctactg

SEQ ID NO: 27377 - RNA, 21 nt, synthetic construct
  source 1..21: mol_type = other RNA
cttacaaacaaaggcctatac

SEQ ID NO: 27378 - RNA, 21 nt, synthetic construct
  source 1..21: mol_type = other RNA
cttacattcttttgtaagctg

SEQ ID NO: 27379 - RNA, 21 nt, synthetic construct
  source 1..21: mol_type = other RNA
cttacctactggcttcctcta

SEQ ID NO: 27380 - RNA, 21 nt, synthetic construct
  source 1..21: mol_type = other RNA
cttcaggtatatttagcactg

SEQ ID NO: 27381 - RNA, 21 nt, synthetic construct
  source 1..21: mol_type = other RNA
cttcctactagcctcagatac

SEQ ID NO: 27382 - RNA, 21 nt, synthetic construct
  source 1..21: mol_type = other RNA
cttcctctagcttttgtggca

SEQ ID NO: 27383 - RNA, 21 nt, synthetic construct
  source 1..21: mol_type = other RNA
cttctccagtactttctggct

SEQ ID NO: 27384 - RNA, 21 nt, synthetic construct
  source 1..21: mol_type = other RNA
cttcttacctactggcttcct

SEQ ID NO: 27385 - RNA, 21 nt, synthetic construct
  source 1..21: mol_type = other RNA
cttcttgagatgttcgttcag

SEQ ID NO: 27386 - RNA, 21 nt, synthetic construct
  source 1..21: mol_type = other RNA
cttgagatgttcgttcagtgc

SEQ ID NO: 27387 - RNA, 21 nt, synthetic construct
  source 1..21: mol_type = other RNA
cttgcacaaatacatatacac

SEQ ID NO: 27388 - RNA, 21 nt, synthetic construct
  source 1..21: mol_type = other RNA
cttgttcctgctgggtagctc

SEQ ID NO: 27389 - RNA, 21 nt, synthetic construct
  source 1..21: mol_type = other RNA
ctttaagaacattccctgaca

SEQ ID NO: 27390 - RNA, 21 nt, synthetic construct
  source 1..21: mol_type = other RNA
ctttatgatatgactactcat

SEQ ID NO: 27391 - RNA, 21 nt, synthetic construct
  source 1..21: mol_type = other RNA
ctttcagcagcttacaaaaga

SEQ ID NO: 27392 - RNA, 21 nt, synthetic construct
  source 1..21: mol_type = other RNA
ctttctggctggattggtatc

SEQ ID NO: 27393 - RNA, 21 nt, synthetic construct
  source 1..21: mol_type = other RNA
ctttgtttgtaagtcctgctg

SEQ ID NO: 27394 - RNA, 21 nt, synthetic construct
  source 1..21: mol_type = other RNA
cttttgtaagctgctgaaagt

SEQ ID NO: 27395 - RNA, 21 nt, synthetic construct
  source 1..21: mol_type = other RNA
cttttgtggcagcttcaggta

SEQ ID NO: 27396 - RNA, 21 nt, synthetic construct
  source 1..21: mol_type = other RNA
cttttttatatcaaagcagct

SEQ ID NO: 27397 - RNA, 21 nt, synthetic construct
  source 1..21: mol_type = other RNA
gaaaaagacagtggagaaaaa

SEQ ID NO: 27398 - RNA, 21 nt, synthetic construct
  source 1..21: mol_type = other RNA
gaaaccatgctgtgcatcagt

SEQ ID NO: 27399 - RNA, 21 nt, synthetic construct
  source 1..21: mol_type = other RNA
gaaactactggttcagaaacc

SEQ ID NO: 27400 - RNA, 21 nt, synthetic construct
  source 1..21: mol_type = other RNA
gaaagtactggagaagtccag

SEQ ID NO: 27401 - RNA, 21 nt, synthetic construct
  source 1..21: mol_type = other RNA
gaaagttgtgtatgagtagtc

SEQ ID NO: 27402 - RNA, 21 nt, synthetic construct
  source 1..21: mol_type = other RNA
gaaataaggctggcagaatag

SEQ ID NO: 27403 - RNA, 21 nt, synthetic construct
  source 1..21: mol_type = other RNA
gaacaagcccttcctactagc

SEQ ID NO: 27404 - RNA, 21 nt, synthetic construct
  source 1..21: mol_type = other RNA
gaacagcagcctattctgcca

SEQ ID NO: 27405 - RNA, 21 nt, synthetic construct
  source 1..21: mol_type = other RNA
gaacatctcaagaaggtatag

SEQ ID NO: 27406 - RNA, 21 nt, synthetic construct
  source 1..21: mol_type = other RNA
gaacattccctgacaatccca

SEQ ID NO: 27407 - RNA, 21 nt, synthetic construct
  source 1..21: mol_type = other RNA
gaaccagtagtttccctgcag

SEQ ID NO: 27408 - RNA, 21 nt, synthetic construct
  source 1..21: mol_type = other RNA
gaacgaacatctcaagaaggt

SEQ ID NO: 27409 - RNA, 21 nt, synthetic construct
  source 1..21: mol_type = other RNA
gaagccagtaggtaagaagtg

SEQ ID NO: 27410 - RNA, 21 nt, synthetic construct
  source 1..21: mol_type = other RNA
gaagctgccacaaaagctaga

SEQ ID NO: 27411 - RNA, 21 nt, synthetic construct
  source 1..21: mol_type = other RNA
gaagggcttgttcctgctggg

SEQ ID NO: 27412 - RNA, 21 nt, synthetic construct
  source 1..21: mol_type = other RNA
gaaggtataggcctttgtttg

SEQ ID NO: 27413 - RNA, 21 nt, synthetic construct
  source 1..21: mol_type = other RNA
gaagtccaggattataggatg

SEQ ID NO: 27414 - RNA, 21 nt, synthetic construct
  source 1..21: mol_type = other RNA
gaagtgttaagagtgtatatg

SEQ ID NO: 27415 - RNA, 21 nt, synthetic construct
  source 1..21: mol_type = other RNA
gaatacattgtttagagctac

SEQ ID NO: 27416 - RNA, 21 nt, synthetic construct
  source 1..21: mol_type = other RNA
gaataggctgctgttcctacc

SEQ ID NO: 27417 - RNA, 21 nt, synthetic construct
  source 1..21: mol_type = other RNA
gaatgagtcccatcccatctg

SEQ ID NO: 27418 - RNA, 21 nt, synthetic construct
  source 1..21: mol_type = other RNA
gaatgttcttaaagatcagat

SEQ ID NO: 27419 - RNA, 21 nt, synthetic construct
  source 1..21: mol_type = other RNA
gacaatcccaatatgcagatt

SEQ ID NO: 27420 - RNA, 21 nt, synthetic construct
  source 1..21: mol_type = other RNA
gacagcaggacttacaaacaa

SEQ ID NO: 27421 - RNA, 21 nt, synthetic construct
  source 1..21: mol_type = other RNA
gacatttgttagtacatggta

SEQ ID NO: 27422 - RNA, 21 nt, synthetic construct
  source 1..21: mol_type = other RNA
gaccttttttatatcaaagca

SEQ ID NO: 27423 - RNA, 21 nt, synthetic construct
  source 1..21: mol_type = other RNA
gactactcatacacaactttc

SEQ ID NO: 27424 - RNA, 21 nt, synthetic construct
  source 1..21: mol_type = other RNA
gactcattcagggtagtatgg

SEQ ID NO: 27425 - RNA, 21 nt, synthetic construct
  source 1..21: mol_type = other RNA
gacttacaaacaaaggcctat

SEQ ID NO: 27426 - RNA, 21 nt, synthetic construct
  source 1..21: mol_type = other RNA
gacttctccagtactttctgg

SEQ ID NO: 27427 - RNA, 21 nt, synthetic construct
  source 1..21: mol_type = other RNA
gagaagtccaggattatagga

SEQ ID NO: 27428 - RNA, 21 nt, synthetic construct
  source 1..21: mol_type = other RNA
gagatactgatgcacagcatg

SEQ ID NO: 27429 - RNA, 21 nt, synthetic construct
  source 1..21: mol_type = other RNA
gagatgttcgttcagtgctaa

SEQ ID NO: 27430 - RNA, 21 nt, synthetic construct
  source 1..21: mol_type = other RNA
gagcagcagcagcacttgcac

SEQ ID NO: 27431 - RNA, 21 nt, synthetic construct
  source 1..21: mol_type = other RNA
gagcagggagcagcagcagca

SEQ ID NO: 27432 - RNA, 21 nt, synthetic construct
  source 1..21: mol_type = other RNA
gagctacccagcaggaacaag

SEQ ID NO: 27433 - RNA, 21 nt, synthetic construct
  source 1..21: mol_type = other RNA
gaggaagccagtaggtaagaa

SEQ ID NO: 27434 - RNA, 21 nt, synthetic construct
  source 1..21: mol_type = other RNA
gaggctagtaggaagggcttg

SEQ ID NO: 27435 - RNA, 21 nt, synthetic construct
  source 1..21: mol_type = other RNA
gagtagtcatatcataaagct

SEQ ID NO: 27436 - RNA, 21 nt, synthetic construct
  source 1..21: mol_type = other RNA
gagtcccatcccatctgatat

SEQ ID NO: 27437 - RNA, 21 nt, synthetic construct
  source 1..21: mol_type = other RNA
gagtgtatatgtatttgtgca

SEQ ID NO: 27438 - RNA, 21 nt, synthetic construct
  source 1..21: mol_type = other RNA
gataccaatccagccagaaag

SEQ ID NO: 27439 - RNA, 21 nt, synthetic construct
  source 1..21: mol_type = other RNA
gatactgatgcacagcatggt

SEQ ID NO: 27440 - RNA, 21 nt, synthetic construct
  source 1..21: mol_type = other RNA
gatataaaaaaggtctatggc

SEQ ID NO: 27441 - RNA, 21 nt, synthetic construct
  source 1..21: mol_type = other RNA
gatatgactactcatacacaa

SEQ ID NO: 27442 - RNA, 21 nt, synthetic construct
  source 1..21: mol_type = other RNA
gatcagattagtggcacctgc

SEQ ID NO: 27443 - RNA, 21 nt, synthetic construct
  source 1..21: mol_type = other RNA
gatctttaagaacattccctg

SEQ ID NO: 27444 - RNA, 21 nt, synthetic construct
  source 1..21: mol_type = other RNA
gatgcacagcatggtttctga

SEQ ID NO: 27445 - RNA, 21 nt, synthetic construct
  source 1..21: mol_type = other RNA
gatgctaggacagcaggactt

SEQ ID NO: 27446 - RNA, 21 nt, synthetic construct
  source 1..21: mol_type = other RNA
gatgggactcattcagggtag

SEQ ID NO: 27447 - RNA, 21 nt, synthetic construct
  source 1..21: mol_type = other RNA
gatgggatgggactcattcag

SEQ ID NO: 27448 - RNA, 21 nt, synthetic construct
  source 1..21: mol_type = other RNA
gatgttcgttcagtgctaaat

SEQ ID NO: 27449 - RNA, 21 nt, synthetic construct
  source 1..21: mol_type = other RNA
gattagtggcacctgctgaga

SEQ ID NO: 27450 - RNA, 21 nt, synthetic construct
  source 1..21: mol_type = other RNA
gattataggatgctaggacag

SEQ ID NO: 27451 - RNA, 21 nt, synthetic construct
  source 1..21: mol_type = other RNA
gattggtatctgaggctagta

SEQ ID NO: 27452 - RNA, 21 nt, synthetic construct
  source 1..21: mol_type = other RNA
gattgtcagggaatgttctta

SEQ ID NO: 27453 - RNA, 21 nt, synthetic construct
  source 1..21: mol_type = other RNA
gattgtttatatcagatggga

SEQ ID NO: 27454 - RNA, 21 nt, synthetic construct
  source 1..21: mol_type = other RNA
gcaagtgctgctgctgctccc

SEQ ID NO: 27455 - RNA, 21 nt, synthetic construct
  source 1..21: mol_type = other RNA
gcacaaatacatatacactct

SEQ ID NO: 27456 - RNA, 21 nt, synthetic construct
  source 1..21: mol_type = other RNA
gcacagcatggtttctgaacc

SEQ ID NO: 27457 - RNA, 21 nt, synthetic construct
  source 1..21: mol_type = other RNA
gcacctgctgagatactgatg

SEQ ID NO: 27458 - RNA, 21 nt, synthetic construct
  source 1..21: mol_type = other RNA
gcactgaacgaacatctcaag

SEQ ID NO: 27459 - RNA, 21 nt, synthetic construct
  source 1..21: mol_type = other RNA
gcacttgcacaaatacatata

SEQ ID NO: 27460 - RNA, 21 nt, synthetic construct
  source 1..21: mol_type = other RNA
gcagaataggctgctgttcct

SEQ ID NO: 27461 - RNA, 21 nt, synthetic construct
  source 1..21: mol_type = other RNA
gcagattgtttatatcagatg

SEQ ID NO: 27462 - RNA, 21 nt, synthetic construct
  source 1..21: mol_type = other RNA
gcagcacttgcacaaatacat

SEQ ID NO: 27463 - RNA, 21 nt, synthetic construct
  source 1..21: mol_type = other RNA
gcagcagcacttgcacaaata

SEQ ID NO: 27464 - RNA, 21 nt, synthetic construct
  source 1..21: mol_type = other RNA
gcagcagcagcacttgcacaa

SEQ ID NO: 27465 - RNA, 21 nt, synthetic construct
  source 1..21: mol_type = other RNA
gcagcctattctgccagcctt

SEQ ID NO: 27466 - RNA, 21 nt, synthetic construct
  source 1..21: mol_type = other RNA
gcagcttcaggtatatttagc

SEQ ID NO: 27467 - RNA, 21 nt, synthetic construct
  source 1..21: mol_type = other RNA
gcagctttatgatatgactac

SEQ ID NO: 27468 - RNA, 21 nt, synthetic construct
  source 1..21: mol_type = other RNA
gcaggaacaagcccttcctac

SEQ ID NO: 27469 - RNA, 21 nt, synthetic construct
  source 1..21: mol_type = other RNA
gcaggacttacaaacaaaggc

SEQ ID NO: 27470 - RNA, 21 nt, synthetic construct
  source 1..21: mol_type = other RNA
gcagggaaactactggttcag

SEQ ID NO: 27471 - RNA, 21 nt, synthetic construct
  source 1..21: mol_type = other RNA
gcagggagcagcagcagcact

SEQ ID NO: 27472 - RNA, 21 nt, synthetic construct
  source 1..21: mol_type = other RNA
gcaggtgccactaatctgatc

SEQ ID NO: 27473 - RNA, 21 nt, synthetic construct
  source 1..21: mol_type = other RNA
gcagttgagcagggagcagca

SEQ ID NO: 27474 - RNA, 21 nt, synthetic construct
  source 1..21: mol_type = other RNA
gcatattgggattgtcaggga

SEQ ID NO: 27475 - RNA, 21 nt, synthetic construct
  source 1..21: mol_type = other RNA
gcatcagtatctcagcaggtg

SEQ ID NO: 27476 - RNA, 21 nt, synthetic construct
  source 1..21: mol_type = other RNA
gcatcctataatcctggactt

SEQ ID NO: 27477 - RNA, 21 nt, synthetic construct
  source 1..21: mol_type = other RNA
gcatggtttctgaaccagtag

SEQ ID NO: 27478 - RNA, 21 nt, synthetic construct
  source 1..21: mol_type = other RNA
gccacaaaagctagaggaagc

SEQ ID NO: 27479 - RNA, 21 nt, synthetic construct
  source 1..21: mol_type = other RNA
gccactaatctgatctttaag

SEQ ID NO: 27480 - RNA, 21 nt, synthetic construct
  source 1..21: mol_type = other RNA
gccagaaagtactggagaagt

SEQ ID NO: 27481 - RNA, 21 nt, synthetic construct
  source 1..21: mol_type = other RNA
gccagccttatttctaaccat

SEQ ID NO: 27482 - RNA, 21 nt, synthetic construct
  source 1..21: mol_type = other RNA
gccagtaggtaagaagtgtta

SEQ ID NO: 27483 - RNA, 21 nt, synthetic construct
  source 1..21: mol_type = other RNA
gccatactaccctgaatgagt

SEQ ID NO: 27484 - RNA, 21 nt, synthetic construct
  source 1..21: mol_type = other RNA
gccatagaccttttttatatc

SEQ ID NO: 27485 - RNA, 21 nt, synthetic construct
  source 1..21: mol_type = other RNA
gcccttcctactagcctcaga

SEQ ID NO: 27486 - RNA, 21 nt, synthetic construct
  source 1..21: mol_type = other RNA
gcctataccttcttgagatgt

SEQ ID NO: 27487 - RNA, 21 nt, synthetic construct
  source 1..21: mol_type = other RNA
gcctattctgccagccttatt

SEQ ID NO: 27488 - RNA, 21 nt, synthetic construct
  source 1..21: mol_type = other RNA
gcctcagataccaatccagcc

SEQ ID NO: 27489 - RNA, 21 nt, synthetic construct
  source 1..21: mol_type = other RNA
gccttatttctaaccatttta

SEQ ID NO: 27490 - RNA, 21 nt, synthetic construct
  source 1..21: mol_type = other RNA
gcctttgtttgtaagtcctgc

SEQ ID NO: 27491 - RNA, 21 nt, synthetic construct
  source 1..21: mol_type = other RNA
gctaaatatacctgaagctgc

SEQ ID NO: 27492 - RNA, 21 nt, synthetic construct
  source 1..21: mol_type = other RNA
gctacccagcaggaacaagcc

SEQ ID NO: 27493 - RNA, 21 nt, synthetic construct
  source 1..21: mol_type = other RNA
gctagaggaagccagtaggta

SEQ ID NO: 27494 - RNA, 21 nt, synthetic construct
  source 1..21: mol_type = other RNA
gctaggacagcaggacttaca

SEQ ID NO: 27495 - RNA, 21 nt, synthetic construct
  source 1..21: mol_type = other RNA
gctagtaggaagggcttgttc

SEQ ID NO: 27496 - RNA, 21 nt, synthetic construct
  source 1..21: mol_type = other RNA
gctcaactgcagggaaactac

SEQ ID NO: 27497 - RNA, 21 nt, synthetic construct
  source 1..21: mol_type = other RNA
gctccctgctcaactgcaggg

SEQ ID NO: 27498 - RNA, 21 nt, synthetic construct
  source 1..21: mol_type = other RNA
gctctaaacaatgtattcatg

SEQ ID NO: 27499 - RNA, 21 nt, synthetic construct
  source 1..21: mol_type = other RNA
gctgaaagttgtgtatgagta

SEQ ID NO: 27500 - RNA, 21 nt, synthetic construct
  source 1..21: mol_type = other RNA
gctgagatactgatgcacagc

SEQ ID NO: 27501 - RNA, 21 nt, synthetic construct
  source 1..21: mol_type = other RNA
gctgccacaaaagctagagga

SEQ ID NO: 27502 - RNA, 21 nt, synthetic construct
  source 1..21: mol_type = other RNA
gctgctccctgctcaactgca

SEQ ID NO: 27503 - RNA, 21 nt, synthetic construct
  source 1..21: mol_type = other RNA
gctgctgaaagttgtgtatga

SEQ ID NO: 27504 - RNA, 21 nt, synthetic construct
  source 1..21: mol_type = other RNA
gctgctgctccctgctcaact

SEQ ID NO: 27505 - RNA, 21 nt, synthetic construct
  source 1..21: mol_type = other RNA
gctgctgctgctccctgctca

SEQ ID NO: 27506 - RNA, 21 nt, synthetic construct
  source 1..21: mol_type = other RNA
gctgctgttcctacccatgaa

SEQ ID NO: 27507 - RNA, 21 nt, synthetic construct
  source 1..21: mol_type = other RNA
gctgctttgatataaaaaagg

SEQ ID NO: 27508 - RNA, 21 nt, synthetic construct
  source 1..21: mol_type = other RNA
gctggattggtatctgaggct

SEQ ID NO: 27509 - RNA, 21 nt, synthetic construct
  source 1..21: mol_type = other RNA
gctggcagaataggctgctgt

SEQ ID NO: 27510 - RNA, 21 nt, synthetic construct
  source 1..21: mol_type = other RNA
gctgggtagctctaaacaatg

SEQ ID NO: 27511 - RNA, 21 nt, synthetic construct
  source 1..21: mol_type = other RNA
gctgtcctagcatcctataat

SEQ ID NO: 27512 - RNA, 21 nt, synthetic construct
  source 1..21: mol_type = other RNA
gctgtgcatcagtatctcagc

SEQ ID NO: 27513 - RNA, 21 nt, synthetic construct
  source 1..21: mol_type = other RNA
gctgttcctacccatgaatac

SEQ ID NO: 27514 - RNA, 21 nt, synthetic construct
  source 1..21: mol_type = other RNA
gcttcaggtatatttagcact

SEQ ID NO: 27515 - RNA, 21 nt, synthetic construct
  source 1..21: mol_type = other RNA
gcttcctctagcttttgtggc

SEQ ID NO: 27516 - RNA, 21 nt, synthetic construct
  source 1..21: mol_type = other RNA
gcttgttcctgctgggtagct

SEQ ID NO: 27517 - RNA, 21 nt, synthetic construct
  source 1..21: mol_type = other RNA
gctttatgatatgactactca

SEQ ID NO: 27518 - RNA, 21 nt, synthetic construct
  source 1..21: mol_type = other RNA
gctttgatataaaaaaggtct

SEQ ID NO: 27519 - RNA, 21 nt, synthetic construct
  source 1..21: mol_type = other RNA
gcttttgtggcagcttcaggt

SEQ ID NO: 27520 - RNA, 21 nt, synthetic construct
  source 1..21: mol_type = other RNA
ggaaactactggttcagaaac

SEQ ID NO: 27521 - RNA, 21 nt, synthetic construct
  source 1..21: mol_type = other RNA
ggaacaagcccttcctactag

SEQ ID NO: 27522 - RNA, 21 nt, synthetic construct
  source 1..21: mol_type = other RNA
ggaacagcagcctattctgcc

SEQ ID NO: 27523 - RNA, 21 nt, synthetic construct
  source 1..21: mol_type = other RNA
ggaagacattaagttttactt

SEQ ID NO: 27524 - RNA, 21 nt, synthetic construct
  source 1..21: mol_type = other RNA
ggaagccagtaggtaagaagt

SEQ ID NO: 27525 - RNA, 21 nt, synthetic construct
  source 1..21: mol_type = other RNA
ggaagggcttgttcctgctgg

SEQ ID NO: 27526 - RNA, 21 nt, synthetic construct
  source 1..21: mol_type = other RNA
ggaatgttcttaaagatcaga

SEQ ID NO: 27527 - RNA, 21 nt, synthetic construct
  source 1..21: mol_type = other RNA
ggacagcaggacttacaaaca

SEQ ID NO: 27528 - RNA, 21 nt, synthetic construct
  source 1..21: mol_type = other RNA
ggactcattcagggtagtatg

SEQ ID NO: 27529 - RNA, 21 nt, synthetic construct
  source 1..21: mol_type = other RNA
ggacttacaaacaaaggccta

SEQ ID NO: 27530 - RNA, 21 nt, synthetic construct
  source 1..21: mol_type = other RNA
ggacttctccagtactttctg

SEQ ID NO: 27531 - RNA, 21 nt, synthetic construct
  source 1..21: mol_type = other RNA
ggagaagtccaggattatagg

SEQ ID NO: 27532 - RNA, 21 nt, synthetic construct
  source 1..21: mol_type = other RNA
ggagcagcagcagcacttgca

SEQ ID NO: 27533 - RNA, 21 nt, synthetic construct
  source 1..21: mol_type = other RNA
ggatgctaggacagcaggact

SEQ ID NO: 27534 - RNA, 21 nt, synthetic construct
  source 1..21: mol_type = other RNA
ggatgggactcattcagggta

SEQ ID NO: 27535 - RNA, 21 nt, synthetic construct
  source 1..21: mol_type = other RNA
ggattataggatgctaggaca

SEQ ID NO: 27536 - RNA, 21 nt, synthetic construct
  source 1..21: mol_type = other RNA
ggattggtatctgaggctagt

SEQ ID NO: 27537 - RNA, 21 nt, synthetic construct
  source 1..21: mol_type = other RNA
ggattgtcagggaatgttctt

SEQ ID NO: 27538 - RNA, 21 nt, synthetic construct
  source 1..21: mol_type = other RNA
ggcacctgctgagatactgat

SEQ ID NO: 27539 - RNA, 21 nt, synthetic construct
  source 1..21: mol_type = other RNA
ggcagaataggctgctgttcc

SEQ ID NO: 27540 - RNA, 21 nt, synthetic construct
  source 1..21: mol_type = other RNA
ggcagcttcaggtatatttag

SEQ ID NO: 27541 - RNA, 21 nt, synthetic construct
  source 1..21: mol_type = other RNA
ggccatactaccctgaatgag

SEQ ID NO: 27542 - RNA, 21 nt, synthetic construct
  source 1..21: mol_type = other RNA
ggccatagaccttttttatat

SEQ ID NO: 27543 - RNA, 21 nt, synthetic construct
  source 1..21: mol_type = other RNA
ggcctataccttcttgagatg

SEQ ID NO: 27544 - RNA, 21 nt, synthetic construct
  source 1..21: mol_type = other RNA
ggcctttgtttgtaagtcctg

SEQ ID NO: 27545 - RNA, 21 nt, synthetic construct
  source 1..21: mol_type = other RNA
ggctagtaggaagggcttgtt

SEQ ID NO: 27546 - RNA, 21 nt, synthetic construct
  source 1..21: mol_type = other RNA
ggctgctgttcctacccatga

SEQ ID NO: 27547 - RNA, 21 nt, synthetic construct
  source 1..21: mol_type = other RNA
ggctggattggtatctgaggc

SEQ ID NO: 27548 - RNA, 21 nt, synthetic construct
  source 1..21: mol_type = other RNA
ggctggcagaataggctgctg

SEQ ID NO: 27549 - RNA, 21 nt, synthetic construct
  source 1..21: mol_type = other RNA
ggcttcctctagcttttgtgg

SEQ ID NO: 27550 - RNA, 21 nt, synthetic construct
  source 1..21: mol_type = other RNA
ggcttgttcctgctgggtagc

SEQ ID NO: 27551 - RNA, 21 nt, synthetic construct
  source 1..21: mol_type = other RNA
gggaaactactggttcagaaa

SEQ ID NO: 27552 - RNA, 21 nt, synthetic construct
  source 1..21: mol_type = other RNA
gggaatgttcttaaagatcag

SEQ ID NO: 27553 - RNA, 21 nt, synthetic construct
  source 1..21: mol_type = other RNA
gggactcattcagggtagtat

SEQ ID NO: 27554 - RNA, 21 nt, synthetic construct
  source 1..21: mol_type = other RNA
gggagcagcagcagcacttgc

SEQ ID NO: 27555 - RNA, 21 nt, synthetic construct
  source 1..21: mol_type = other RNA
gggatgggactcattcagggt

SEQ ID NO: 27556 - RNA, 21 nt, synthetic construct
  source 1..21: mol_type = other RNA
gggattgtcagggaatgttct

SEQ ID NO: 27557 - RNA, 21 nt, synthetic construct
  source 1..21: mol_type = other RNA
gggcttgttcctgctgggtag

SEQ ID NO: 27558 - RNA, 21 nt, synthetic construct
  source 1..21: mol_type = other RNA
gggtagctctaaacaatgtat

SEQ ID NO: 27559 - RNA, 21 nt, synthetic construct
  source 1..21: mol_type = other RNA
gggtaggaacagcagcctatt

SEQ ID NO: 27560 - RNA, 21 nt, synthetic construct
  source 1..21: mol_type = other RNA
gggtagtatggccatagacct

SEQ ID NO: 27561 - RNA, 21 nt, synthetic construct
  source 1..21: mol_type = other RNA
ggtaagaagtgttaagagtgt

SEQ ID NO: 27562 - RNA, 21 nt, synthetic construct
  source 1..21: mol_type = other RNA
ggtagctctaaacaatgtatt

SEQ ID NO: 27563 - RNA, 21 nt, synthetic construct
  source 1..21: mol_type = other RNA
ggtaggaacagcagcctattc

SEQ ID NO: 27564 - RNA, 21 nt, synthetic construct
  source 1..21: mol_type = other RNA
ggtagtatggccatagacctt

SEQ ID NO: 27565 - RNA, 21 nt, synthetic construct
  source 1..21: mol_type = other RNA
ggtataggcctttgtttgtaa

SEQ ID NO: 27566 - RNA, 21 nt, synthetic construct
  source 1..21: mol_type = other RNA
ggtatatttagcactgaacga

SEQ ID NO: 27567 - RNA, 21 nt, synthetic construct
  source 1..21: mol_type = other RNA
ggtatctgaggctagtaggaa

SEQ ID NO: 27568 - RNA, 21 nt, synthetic construct
  source 1..21: mol_type = other RNA
ggtctatggccatactaccct

SEQ ID NO: 27569 - RNA, 21 nt, synthetic construct
  source 1..21: mol_type = other RNA
ggtgccactaatctgatcttt

SEQ ID NO: 27570 - RNA, 21 nt, synthetic construct
  source 1..21: mol_type = other RNA
ggttagaaataaggctggcag

SEQ ID NO: 27571 - RNA, 21 nt, synthetic construct
  source 1..21: mol_type = other RNA
ggttcagaaaccatgctgtgc

SEQ ID NO: 27572 - RNA, 21 nt, synthetic construct
  source 1..21: mol_type = other RNA
ggtttctgaaccagtagtttc

SEQ ID NO: 27573 - RNA, 21 nt, synthetic construct
  source 1..21: mol_type = other RNA
gtaaaacttaatgtcttcctt

SEQ ID NO: 27574 - RNA, 21 nt, synthetic construct
  source 1..21: mol_type = other RNA
gtaagaagtgttaagagtgta

SEQ ID NO: 27575 - RNA, 21 nt, synthetic construct
  source 1..21: mol_type = other RNA
gtaagctgctgaaagttgtgt

SEQ ID NO: 27576 - RNA, 21 nt, synthetic construct
  source 1..21: mol_type = other RNA
gtaagtcctgctgtcctagca

SEQ ID NO: 27577 - RNA, 21 nt, synthetic construct
  source 1..21: mol_type = other RNA
gtaagtcttacattcttttgt

SEQ ID NO: 27578 - RNA, 21 nt, synthetic construct
  source 1..21: mol_type = other RNA
gtactggagaagtccaggatt

SEQ ID NO: 27579 - RNA, 21 nt, synthetic construct
  source 1..21: mol_type = other RNA
gtactttctggctggattggt

SEQ ID NO: 27580 - RNA, 21 nt, synthetic construct
  source 1..21: mol_type = other RNA
gtagctctaaacaatgtattc

SEQ ID NO: 27581 - RNA, 21 nt, synthetic construct
  source 1..21: mol_type = other RNA
gtaggaacagcagcctattct

SEQ ID NO: 27582 - RNA, 21 nt, synthetic construct
  source 1..21: mol_type = other RNA
gtaggaagggcttgttcctgc

SEQ ID NO: 27583 - RNA, 21 nt, synthetic construct
  source 1..21: mol_type = other RNA
gtaggtaagaagtgttaagag

SEQ ID NO: 27584 - RNA, 21 nt, synthetic construct
  source 1..21: mol_type = other RNA
gtagtatggccatagaccttt

SEQ ID NO: 27585 - RNA, 21 nt, synthetic construct
  source 1..21: mol_type = other RNA
gtagtcatatcataaagctgc

SEQ ID NO: 27586 - RNA, 21 nt, synthetic construct
  source 1..21: mol_type = other RNA
gtagtttccctgcagttgagc

SEQ ID NO: 27587 - RNA, 21 nt, synthetic construct
  source 1..21: mol_type = other RNA
gtataggcctttgtttgtaag

SEQ ID NO: 27588 - RNA, 21 nt, synthetic construct
  source 1..21: mol_type = other RNA
gtatatgtatttgtgcaagtg

SEQ ID NO: 27589 - RNA, 21 nt, synthetic construct
  source 1..21: mol_type = other RNA
gtatatttagcactgaacgaa

SEQ ID NO: 27590 - RNA, 21 nt, synthetic construct
  source 1..21: mol_type = other RNA
gtatctcagcaggtgccacta

SEQ ID NO: 27591 - RNA, 21 nt, synthetic construct
  source 1..21: mol_type = other RNA
gtatctgaggctagtaggaag

SEQ ID NO: 27592 - RNA, 21 nt, synthetic construct
  source 1..21: mol_type = other RNA
gtatgagtagtcatatcataa

SEQ ID NO: 27593 - RNA, 21 nt, synthetic construct
  source 1..21: mol_type = other RNA
gtatggccatagacctttttt

SEQ ID NO: 27594 - RNA, 21 nt, synthetic construct
  source 1..21: mol_type = other RNA
gtattcatgggtaggaacagc

SEQ ID NO: 27595 - RNA, 21 nt, synthetic construct
  source 1..21: mol_type = other RNA
gtatttgtgcaagtgctgctg

SEQ ID NO: 27596 - RNA, 21 nt, synthetic construct
  source 1..21: mol_type = other RNA
gtcagggaatgttcttaaaga

SEQ ID NO: 27597 - RNA, 21 nt, synthetic construct
  source 1..21: mol_type = other RNA
gtcatatcataaagctgcttt

SEQ ID NO: 27598 - RNA, 21 nt, synthetic construct
  source 1..21: mol_type = other RNA
gtccaggattataggatgcta

SEQ ID NO: 27599 - RNA, 21 nt, synthetic construct
  source 1..21: mol_type = other RNA
gtcccatcccatctgatataa

SEQ ID NO: 27600 - RNA, 21 nt, synthetic construct
  source 1..21: mol_type = other RNA
gtcctagcatcctataatcct

SEQ ID NO: 27601 - RNA, 21 nt, synthetic construct
  source 1..21: mol_type = other RNA
gtcctgctgtcctagcatcct

SEQ ID NO: 27602 - RNA, 21 nt, synthetic construct
  source 1..21: mol_type = other RNA
gtctatggccatactaccctg

SEQ ID NO: 27603 - RNA, 21 nt, synthetic construct
  source 1..21: mol_type = other RNA
gtcttacattcttttgtaagc

SEQ ID NO: 27604 - RNA, 21 nt, synthetic construct
  source 1..21: mol_type = other RNA
gtgcaagtgctgctgctgctc

SEQ ID NO: 27605 - RNA, 21 nt, synthetic construct
  source 1..21: mol_type = other RNA
gtgcatcagtatctcagcagg

SEQ ID NO: 27606 - RNA, 21 nt, synthetic construct
  source 1..21: mol_type = other RNA
gtgccactaatctgatcttta

SEQ ID NO: 27607 - RNA, 21 nt, synthetic construct
  source 1..21: mol_type = other RNA
gtgctaaatatacctgaagct

SEQ ID NO: 27608 - RNA, 21 nt, synthetic construct
  source 1..21: mol_type = other RNA
gtgctgctgctgctccctgct

SEQ ID NO: 27609 - RNA, 21 nt, synthetic construct
  source 1..21: mol_type = other RNA
gtggcacctgctgagatactg

SEQ ID NO: 27610 - RNA, 21 nt, synthetic construct
  source 1..21: mol_type = other RNA
gtggcagcttcaggtatattt

SEQ ID NO: 27611 - RNA, 21 nt, synthetic construct
  source 1..21: mol_type = other RNA
gtgtatatgtatttgtgcaag

SEQ ID NO: 27612 - RNA, 21 nt, synthetic construct
  source 1..21: mol_type = other RNA
gtgtatgagtagtcatatcat

SEQ ID NO: 27613 - RNA, 21 nt, synthetic construct
  source 1..21: mol_type = other RNA
gtgttaagagtgtatatgtat

SEQ ID NO: 27614 - RNA, 21 nt, synthetic construct
  source 1..21: mol_type = other RNA
gttagaaataaggctggcaga

SEQ ID NO: 27615 - RNA, 21 nt, synthetic construct
  source 1..21: mol_type = other RNA
gttcagaaaccatgctgtgca

SEQ ID NO: 27616 - RNA, 21 nt, synthetic construct
  source 1..21: mol_type = other RNA
gttcagtgctaaatatacctg

SEQ ID NO: 27617 - RNA, 21 nt, synthetic construct
  source 1..21: mol_type = other RNA
gttcctacccatgaatacatt

SEQ ID NO: 27618 - RNA, 21 nt, synthetic construct
  source 1..21: mol_type = other RNA
gttcctgctgggtagctctaa

SEQ ID NO: 27619 - RNA, 21 nt, synthetic construct
  source 1..21: mol_type = other RNA
gttcgttcagtgctaaatata

SEQ ID NO: 27620 - RNA, 21 nt, synthetic construct
  source 1..21: mol_type = other RNA
gttcttaaagatcagattagt

SEQ ID NO: 27621 - RNA, 21 nt, synthetic construct
  source 1..21: mol_type = other RNA
gttgagcagggagcagcagca

SEQ ID NO: 27622 - RNA, 21 nt, synthetic construct
  source 1..21: mol_type = other RNA
gttgtgtatgagtagtcatat

SEQ ID NO: 27623 - RNA, 21 nt, synthetic construct
  source 1..21: mol_type = other RNA
gtttagagctacccagcagga

SEQ ID NO: 27624 - RNA, 21 nt, synthetic construct
  source 1..21: mol_type = other RNA
gtttatatcagatgggatggg

SEQ ID NO: 27625 - RNA, 21 nt, synthetic construct
  source 1..21: mol_type = other RNA
gtttccctgcagttgagcagg

SEQ ID NO: 27626 - RNA, 21 nt, synthetic construct
  source 1..21: mol_type = other RNA
gtttctgaaccagtagtttcc

SEQ ID NO: 27627 - RNA, 21 nt, synthetic construct
  source 1..21: mol_type = other RNA
gtttgtaagtcctgctgtcct

SEQ ID NO: 27628 - RNA, 21 nt, synthetic construct
  source 1..21: mol_type = other RNA
taaaaaaggtctatggccata

SEQ ID NO: 27629 - RNA, 21 nt, synthetic construct
  source 1..21: mol_type = other RNA
taaaatggttagaaataaggc

SEQ ID NO: 27630 - RNA, 21 nt, synthetic construct
  source 1..21: mol_type = other RNA
taaacaatctgcatattggga

SEQ ID NO: 27631 - RNA, 21 nt, synthetic construct
  source 1..21: mol_type = other RNA
taaacaatgtattcatgggta

SEQ ID NO: 27632 - RNA, 21 nt, synthetic construct
  source 1..21: mol_type = other RNA
taaagatcagattagtggcac

SEQ ID NO: 27633 - RNA, 21 nt, synthetic construct
  source 1..21: mol_type = other RNA
taaatatacctgaagctgcca

SEQ ID NO: 27634 - RNA, 21 nt, synthetic construct
  source 1..21: mol_type = other RNA
taacacttcttacctactggc

SEQ ID NO: 27635 - RNA, 21 nt, synthetic construct
  source 1..21: mol_type = other RNA
taagaacattccctgacaatc

SEQ ID NO: 27636 - RNA, 21 nt, synthetic construct
  source 1..21: mol_type = other RNA
taagaagtgttaagagtgtat

SEQ ID NO: 27637 - RNA, 21 nt, synthetic construct
  source 1..21: mol_type = other RNA
taagctgctgaaagttgtgta

SEQ ID NO: 27638 - RNA, 21 nt, synthetic construct
  source 1..21: mol_type = other RNA
taaggctggcagaataggctg

SEQ ID NO: 27639 - RNA, 21 nt, synthetic construct
  source 1..21: mol_type = other RNA
taagtcctgctgtcctagcat

SEQ ID NO: 27640 - RNA, 21 nt, synthetic construct
  source 1..21: mol_type = other RNA
taatcctggacttctccagta

SEQ ID NO: 27641 - RNA, 21 nt, synthetic construct
  source 1..21: mol_type = other RNA
tacaaacaaaggcctatacct

SEQ ID NO: 27642 - RNA, 21 nt, synthetic construct
  source 1..21: mol_type = other RNA
tacacaactttcagcagctta

SEQ ID NO: 27643 - RNA, 21 nt, synthetic construct
  source 1..21: mol_type = other RNA
tacactcttaacacttcttac

SEQ ID NO: 27644 - RNA, 21 nt, synthetic construct
  source 1..21: mol_type = other RNA
tacatatacactcttaacact

SEQ ID NO: 27645 - RNA, 21 nt, synthetic construct
  source 1..21: mol_type = other RNA
tacattcttttgtaagctgct

SEQ ID NO: 27646 - RNA, 21 nt, synthetic construct
  source 1..21: mol_type = other RNA
tacattgtttagagctaccca

SEQ ID NO: 27647 - RNA, 21 nt, synthetic construct
  source 1..21: mol_type = other RNA
taccaatccagccagaaagta

SEQ ID NO: 27648 - RNA, 21 nt, synthetic construct
  source 1..21: mol_type = other RNA
taccatgtactaacaaatgtc

SEQ ID NO: 27649 - RNA, 21 nt, synthetic construct
  source 1..21: mol_type = other RNA
tacccagcaggaacaagccct

SEQ ID NO: 27650 - RNA, 21 nt, synthetic construct
  source 1..21: mol_type = other RNA
tacccatgaatacattgttta

SEQ ID NO: 27651 - RNA, 21 nt, synthetic construct
  source 1..21: mol_type = other RNA
taccctgaatgagtcccatcc

SEQ ID NO: 27652 - RNA, 21 nt, synthetic construct
  source 1..21: mol_type = other RNA
tacctactggcttcctctagc

SEQ ID NO: 27653 - RNA, 21 nt, synthetic construct
  source 1..21: mol_type = other RNA
tacctgaagctgccacaaaag

SEQ ID NO: 27654 - RNA, 21 nt, synthetic construct
  source 1..21: mol_type = other RNA
taccttcttgagatgttcgtt

SEQ ID NO: 27655 - RNA, 21 nt, synthetic construct
  source 1..21: mol_type = other RNA
tactaccctgaatgagtccca

SEQ ID NO: 27656 - RNA, 21 nt, synthetic construct
  source 1..21: mol_type = other RNA
tactagcctcagataccaatc

SEQ ID NO: 27657 - RNA, 21 nt, synthetic construct
  source 1..21: mol_type = other RNA
tactcatacacaactttcagc

SEQ ID NO: 27658 - RNA, 21 nt, synthetic construct
  source 1..21: mol_type = other RNA
tactgatgcacagcatggttt

SEQ ID NO: 27659 - RNA, 21 nt, synthetic construct
  source 1..21: mol_type = other RNA
tactggagaagtccaggatta

SEQ ID NO: 27660 - RNA, 21 nt, synthetic construct
  source 1..21: mol_type = other RNA
tactggcttcctctagctttt

SEQ ID NO: 27661 - RNA, 21 nt, synthetic construct
  source 1..21: mol_type = other RNA
tactggttcagaaaccatgct

SEQ ID NO: 27662 - RNA, 21 nt, synthetic construct
  source 1..21: mol_type = other RNA
tactttctggctggattggta

SEQ ID NO: 27663 - RNA, 21 nt, synthetic construct
  source 1..21: mol_type = other RNA
tagaaataaggctggcagaat

SEQ ID NO: 27664 - RNA, 21 nt, synthetic construct
  source 1..21: mol_type = other RNA
tagacatttgttagtacatgg

SEQ ID NO: 27665 - RNA, 21 nt, synthetic construct
  source 1..21: mol_type = other RNA
tagagctacccagcaggaaca

SEQ ID NO: 27666 - RNA, 21 nt, synthetic construct
  source 1..21: mol_type = other RNA
tagaggaagccagtaggtaag

SEQ ID NO: 27667 - RNA, 21 nt, synthetic construct
  source 1..21: mol_type = other RNA
tagcactgaacgaacatctca

SEQ ID NO: 27668 - RNA, 21 nt, synthetic construct
  source 1..21: mol_type = other RNA
tagcatcctataatcctggac

SEQ ID NO: 27669 - RNA, 21 nt, synthetic construct
  source 1..21: mol_type = other RNA
tagcctcagataccaatccag

SEQ ID NO: 27670 - RNA, 21 nt, synthetic construct
  source 1..21: mol_type = other RNA
tagctctaaacaatgtattca

SEQ ID NO: 27671 - RNA, 21 nt, synthetic construct
  source 1..21: mol_type = other RNA
tagcttttgtggcagcttcag

SEQ ID NO: 27672 - RNA, 21 nt, synthetic construct
  source 1..21: mol_type = other RNA
taggaacagcagcctattctg

SEQ ID NO: 27673 - RNA, 21 nt, synthetic construct
  source 1..21: mol_type = other RNA
taggaagggcttgttcctgct

SEQ ID NO: 27674 - RNA, 21 nt, synthetic construct
  source 1..21: mol_type = other RNA
taggacagcaggacttacaaa

SEQ ID NO: 27675 - RNA, 21 nt, synthetic construct
  source 1..21: mol_type = other RNA
taggatgctaggacagcagga

SEQ ID NO: 27676 - RNA, 21 nt, synthetic construct
  source 1..21: mol_type = other RNA
taggcctttgtttgtaagtcc

SEQ ID NO: 27677 - RNA, 21 nt, synthetic construct
  source 1..21: mol_type = other RNA
taggctgctgttcctacccat

SEQ ID NO: 27678 - RNA, 21 nt, synthetic construct
  source 1..21: mol_type = other RNA
taggtaagaagtgttaagagt

SEQ ID NO: 27679 - RNA, 21 nt, synthetic construct
  source 1..21: mol_type = other RNA
tagtaggaagggcttgttcct

SEQ ID NO: 27680 - RNA, 21 nt, synthetic construct
  source 1..21: mol_type = other RNA
tagtatggccatagacctttt

SEQ ID NO: 27681 - RNA, 21 nt, synthetic construct
  source 1..21: mol_type = other RNA
tagtcatatcataaagctgct

SEQ ID NO: 27682 - RNA, 21 nt, synthetic construct
  source 1..21: mol_type = other RNA
tagtggcacctgctgagatac

SEQ ID NO: 27683 - RNA, 21 nt, synthetic construct
  source 1..21: mol_type = other RNA
tagtttccctgcagttgagca

SEQ ID NO: 27684 - RNA, 21 nt, synthetic construct
  source 1..21: mol_type = other RNA
tataaaaaaggtctatggcca

SEQ ID NO: 27685 - RNA, 21 nt, synthetic construct
  source 1..21: mol_type = other RNA
tataaacaatctgcatattgg

SEQ ID NO: 27686 - RNA, 21 nt, synthetic construct
  source 1..21: mol_type = other RNA
tataatcctggacttctccag

SEQ ID NO: 27687 - RNA, 21 nt, synthetic construct
  source 1..21: mol_type = other RNA
tatacactcttaacacttctt

SEQ ID NO: 27688 - RNA, 21 nt, synthetic construct
  source 1..21: mol_type = other RNA
tatacctgaagctgccacaaa

SEQ ID NO: 27689 - RNA, 21 nt, synthetic construct
  source 1..21: mol_type = other RNA
tataccttcttgagatgttcg

SEQ ID NO: 27690 - RNA, 21 nt, synthetic construct
  source 1..21: mol_type = other RNA
tataggatgctaggacagcag

SEQ ID NO: 27691 - RNA, 21 nt, synthetic construct
  source 1..21: mol_type = other RNA
tataggcctttgtttgtaagt

SEQ ID NO: 27692 - RNA, 21 nt, synthetic construct
  source 1..21: mol_type = other RNA
tatatcaaagcagctttatga

SEQ ID NO: 27693 - RNA, 21 nt, synthetic construct
  source 1..21: mol_type = other RNA
tatatcagatgggatgggact

SEQ ID NO: 27694 - RNA, 21 nt, synthetic construct
  source 1..21: mol_type = other RNA
tatatgtatttgtgcaagtgc

SEQ ID NO: 27695 - RNA, 21 nt, synthetic construct
  source 1..21: mol_type = other RNA
tatatttagcactgaacgaac

SEQ ID NO: 27696 - RNA, 21 nt, synthetic construct
  source 1..21: mol_type = other RNA
tatcaaagcagctttatgata

SEQ ID NO: 27697 - RNA, 21 nt, synthetic construct
  source 1..21: mol_type = other RNA
tatcagatgggatgggactca

SEQ ID NO: 27698 - RNA, 21 nt, synthetic construct
  source 1..21: mol_type = other RNA
tatcataaagctgctttgata

SEQ ID NO: 27699 - RNA, 21 nt, synthetic construct
  source 1..21: mol_type = other RNA
tatctcagcaggtgccactaa

SEQ ID NO: 27700 - RNA, 21 nt, synthetic construct
  source 1..21: mol_type = other RNA
tatctgaggctagtaggaagg

SEQ ID NO: 27701 - RNA, 21 nt, synthetic construct
  source 1..21: mol_type = other RNA
tatgaaaaagacagtggagaa

SEQ ID NO: 27702 - RNA, 21 nt, synthetic construct
  source 1..21: mol_type = other RNA
tatgactactcatacacaact

SEQ ID NO: 27703 - RNA, 21 nt, synthetic construct
  source 1..21: mol_type = other RNA
tatgatatgactactcataca

SEQ ID NO: 27704 - RNA, 21 nt, synthetic construct
  source 1..21: mol_type = other RNA
tatgcagattgtttatatcag

SEQ ID NO: 27705 - RNA, 21 nt, synthetic construct
  source 1..21: mol_type = other RNA
tatggccatactaccctgaat

SEQ ID NO: 27706 - RNA, 21 nt, synthetic construct
  source 1..21: mol_type = other RNA
tatggccatagacctttttta

SEQ ID NO: 27707 - RNA, 21 nt, synthetic construct
  source 1..21: mol_type = other RNA
tatgtatttgtgcaagtgctg

SEQ ID NO: 27708 - RNA, 21 nt, synthetic construct
  source 1..21: mol_type = other RNA
tattcatgggtaggaacagca

SEQ ID NO: 27709 - RNA, 21 nt, synthetic construct
  source 1..21: mol_type = other RNA
tattctgccagccttatttct

SEQ ID NO: 27710 - RNA, 21 nt, synthetic construct
  source 1..21: mol_type = other RNA
tattgggattgtcagggaatg

SEQ ID NO: 27711 - RNA, 21 nt, synthetic construct
  source 1..21: mol_type = other RNA
tatttagcactgaacgaacat

SEQ ID NO: 27712 - RNA, 21 nt, synthetic construct
  source 1..21: mol_type = other RNA
tatttgtgcaagtgctgctgc

SEQ ID NO: 27713 - RNA, 21 nt, synthetic construct
  source 1..21: mol_type = other RNA
tcaaagcagctttatgatatg

SEQ ID NO: 27714 - RNA, 21 nt, synthetic construct
  source 1..21: mol_type = other RNA
tcaactgcagggaaactactg

SEQ ID NO: 27715 - RNA, 21 nt, synthetic construct
  source 1..21: mol_type = other RNA
tcaagaaggtataggcctttg

SEQ ID NO: 27716 - RNA, 21 nt, synthetic construct
  source 1..21: mol_type = other RNA
tcagaaaccatgctgtgcatc

SEQ ID NO: 27717 - RNA, 21 nt, synthetic construct
  source 1..21: mol_type = other RNA
tcagataccaatccagccaga

SEQ ID NO: 27718 - RNA, 21 nt, synthetic construct
  source 1..21: mol_type = other RNA
tcagatgggatgggactcatt

SEQ ID NO: 27719 - RNA, 21 nt, synthetic construct
  source 1..21: mol_type = other RNA
tcagattagtggcacctgctg

SEQ ID NO: 27720 - RNA, 21 nt, synthetic construct
  source 1..21: mol_type = other RNA
tcagcagcttacaaaagaatg

SEQ ID NO: 27721 - RNA, 21 nt, synthetic construct
  source 1..21: mol_type = other RNA
tcagcaggtgccactaatctg

SEQ ID NO: 27722 - RNA, 21 nt, synthetic construct
  source 1..21: mol_type = other RNA
tcagggaatgttcttaaagat

SEQ ID NO: 27723 - RNA, 21 nt, synthetic construct
  source 1..21: mol_type = other RNA
tcagggtagtatggccataga

SEQ ID NO: 27724 - RNA, 21 nt, synthetic construct
  source 1..21: mol_type = other RNA
tcaggtatatttagcactgaa

SEQ ID NO: 27725 - RNA, 21 nt, synthetic construct
  source 1..21: mol_type = other RNA
tcagtatctcagcaggtgcca

SEQ ID NO: 27726 - RNA, 21 nt, synthetic construct
  source 1..21: mol_type = other RNA
tcagtgctaaatatacctgaa

SEQ ID NO: 27727 - RNA, 21 nt, synthetic construct
  source 1..21: mol_type = other RNA
tcataaagctgctttgatata

SEQ ID NO: 27728 - RNA, 21 nt, synthetic construct
  source 1..21: mol_type = other RNA
tcatacacaactttcagcagc

SEQ ID NO: 27729 - RNA, 21 nt, synthetic construct
  source 1..21: mol_type = other RNA
tcatatcataaagctgctttg

SEQ ID NO: 27730 - RNA, 21 nt, synthetic construct
  source 1..21: mol_type = other RNA
tcatgggtaggaacagcagcc

SEQ ID NO: 27731 - RNA, 21 nt, synthetic construct
  source 1..21: mol_type = other RNA
tcattcagggtagtatggcca

SEQ ID NO: 27732 - RNA, 21 nt, synthetic construct
  source 1..21: mol_type = other RNA
tccagccagaaagtactggag

SEQ ID NO: 27733 - RNA, 21 nt, synthetic construct
  source 1..21: mol_type = other RNA
tccaggattataggatgctag

SEQ ID NO: 27734 - RNA, 21 nt, synthetic construct
  source 1..21: mol_type = other RNA
tccagtactttctggctggat

SEQ ID NO: 27735 - RNA, 21 nt, synthetic construct
  source 1..21: mol_type = other RNA
tcccaatatgcagattgttta

SEQ ID NO: 27736 - RNA, 21 nt, synthetic construct
  source 1..21: mol_type = other RNA
tcccatcccatctgatataaa

SEQ ID NO: 27737 - RNA, 21 nt, synthetic construct
  source 1..21: mol_type = other RNA
tcccatctgatataaacaatc

SEQ ID NO: 27738 - RNA, 21 nt, synthetic construct
  source 1..21: mol_type = other RNA
tccctgacaatcccaatatgc

SEQ ID NO: 27739 - RNA, 21 nt, synthetic construct
  source 1..21: mol_type = other RNA
tccctgcagttgagcagggag

SEQ ID NO: 27740 - RNA, 21 nt, synthetic construct
  source 1..21: mol_type = other RNA
tccctgctcaactgcagggaa

SEQ ID NO: 27741 - RNA, 21 nt, synthetic construct
  source 1..21: mol_type = other RNA
tcctacccatgaatacattgt

SEQ ID NO: 27742 - RNA, 21 nt, synthetic construct
  source 1..21: mol_type = other RNA
tcctactagcctcagatacca

SEQ ID NO: 27743 - RNA, 21 nt, synthetic construct
  source 1..21: mol_type = other RNA
tcctagcatcctataatcctg

SEQ ID NO: 27744 - RNA, 21 nt, synthetic construct
  source 1..21: mol_type = other RNA
tcctataatcctggacttctc

SEQ ID NO: 27745 - RNA, 21 nt, synthetic construct
  source 1..21: mol_type = other RNA
tcctctagcttttgtggcagc

SEQ ID NO: 27746 - RNA, 21 nt, synthetic construct
  source 1..21: mol_type = other RNA
tcctgctgggtagctctaaac

SEQ ID NO: 27747 - RNA, 21 nt, synthetic construct
  source 1..21: mol_type = other RNA
tcctgctgtcctagcatccta

SEQ ID NO: 27748 - RNA, 21 nt, synthetic construct
  source 1..21: mol_type = other RNA
tcctggacttctccagtactt

SEQ ID NO: 27749 - RNA, 21 nt, synthetic construct
  source 1..21: mol_type = other RNA
tcgttcagtgctaaatatacc

SEQ ID NO: 27750 - RNA, 21 nt, synthetic construct
  source 1..21: mol_type = other RNA
tctaaacaatgtattcatggg

SEQ ID NO: 27751 - RNA, 21 nt, synthetic construct
  source 1..21: mol_type = other RNA
tctaaccattttagacatttg

SEQ ID NO: 27752 - RNA, 21 nt, synthetic construct
  source 1..21: mol_type = other RNA
tctagcttttgtggcagcttc

SEQ ID NO: 27753 - RNA, 21 nt, synthetic construct
  source 1..21: mol_type = other RNA
tctatggccatactaccctga

SEQ ID NO: 27754 - RNA, 21 nt, synthetic construct
  source 1..21: mol_type = other RNA
tctcaagaaggtataggcctt

SEQ ID NO: 27755 - RNA, 21 nt, synthetic construct
  source 1..21: mol_type = other RNA
tctcagcaggtgccactaatc

SEQ ID NO: 27756 - RNA, 21 nt, synthetic construct
  source 1..21: mol_type = other RNA
tctccagtactttctggctgg

SEQ ID NO: 27757 - RNA, 21 nt, synthetic construct
  source 1..21: mol_type = other RNA
tctgaaccagtagtttccctg

SEQ ID NO: 27758 - RNA, 21 nt, synthetic construct
  source 1..21: mol_type = other RNA
tctgaggctagtaggaagggc

SEQ ID NO: 27759 - RNA, 21 nt, synthetic construct
  source 1..21: mol_type = other RNA
tctgatataaacaatctgcat

SEQ ID NO: 27760 - RNA, 21 nt, synthetic construct
  source 1..21: mol_type = other RNA
tctgatctttaagaacattcc

SEQ ID NO: 27761 - RNA, 21 nt, synthetic construct
  source 1..21: mol_type = other RNA
tctgcatattgggattgtcag

SEQ ID NO: 27762 - RNA, 21 nt, synthetic construct
  source 1..21: mol_type = other RNA
tctgccagccttatttctaac

SEQ ID NO: 27763 - RNA, 21 nt, synthetic construct
  source 1..21: mol_type = other RNA
tctggctggattggtatctga

SEQ ID NO: 27764 - RNA, 21 nt, synthetic construct
  source 1..21: mol_type = other RNA
tcttaaagatcagattagtgg

SEQ ID NO: 27765 - RNA, 21 nt, synthetic construct
  source 1..21: mol_type = other RNA
tcttaacacttcttacctact

SEQ ID NO: 27766 - RNA, 21 nt, synthetic construct
  source 1..21: mol_type = other RNA
tcttacattcttttgtaagct

SEQ ID NO: 27767 - RNA, 21 nt, synthetic construct
  source 1..21: mol_type = other RNA
tcttacctactggcttcctct

SEQ ID NO: 27768 - RNA, 21 nt, synthetic construct
  source 1..21: mol_type = other RNA
tcttgagatgttcgttcagtg

SEQ ID NO: 27769 - RNA, 21 nt, synthetic construct
  source 1..21: mol_type = other RNA
tctttaagaacattccctgac

SEQ ID NO: 27770 - RNA, 21 nt, synthetic construct
  source 1..21: mol_type = other RNA
tcttttgtaagctgctgaaag

SEQ ID NO: 27771 - RNA, 21 nt, synthetic construct
  source 1..21: mol_type = other RNA
tgaaaaagacagtggagaaaa

SEQ ID NO: 27772 - RNA, 21 nt, synthetic construct
  source 1..21: mol_type = other RNA
tgaaagttgtgtatgagtagt

SEQ ID NO: 27773 - RNA, 21 nt, synthetic construct
  source 1..21: mol_type = other RNA
tgaaccagtagtttccctgca

SEQ ID NO: 27774 - RNA, 21 nt, synthetic construct
  source 1..21: mol_type = other RNA
tgaacgaacatctcaagaagg

SEQ ID NO: 27775 - RNA, 21 nt, synthetic construct
  source 1..21: mol_type = other RNA
tgaagctgccacaaaagctag

SEQ ID NO: 27776 - RNA, 21 nt, synthetic construct
  source 1..21: mol_type = other RNA
tgaatacattgtttagagcta

SEQ ID NO: 27777 - RNA, 21 nt, synthetic construct
  source 1..21: mol_type = other RNA
tgaatgagtcccatcccatct

SEQ ID NO: 27778 - RNA, 21 nt, synthetic construct
  source 1..21: mol_type = other RNA
tgacaatcccaatatgcagat

SEQ ID NO: 27779 - RNA, 21 nt, synthetic construct
  source 1..21: mol_type = other RNA
tgactactcatacacaacttt

SEQ ID NO: 27780 - RNA, 21 nt, synthetic construct
  source 1..21: mol_type = other RNA
tgagatactgatgcacagcat

SEQ ID NO: 27781 - RNA, 21 nt, synthetic construct
  source 1..21: mol_type = other RNA
tgagatgttcgttcagtgcta

SEQ ID NO: 27782 - RNA, 21 nt, synthetic construct
  source 1..21: mol_type = other RNA
tgagcagggagcagcagcagc

SEQ ID NO: 27783 - RNA, 21 nt, synthetic construct
  source 1..21: mol_type = other RNA
tgaggctagtaggaagggctt

SEQ ID NO: 27784 - RNA, 21 nt, synthetic construct
  source 1..21: mol_type = other RNA
tgagtagtcatatcataaagc

SEQ ID NO: 27785 - RNA, 21 nt, synthetic construct
  source 1..21: mol_type = other RNA
tgagtcccatcccatctgata

SEQ ID NO: 27786 - RNA, 21 nt, synthetic construct
  source 1..21: mol_type = other RNA
tgatataaaaaaggtctatgg

SEQ ID NO: 27787 - RNA, 21 nt, synthetic construct
  source 1..21: mol_type = other RNA
tgatatgactactcatacaca

SEQ ID NO: 27788 - RNA, 21 nt, synthetic construct
  source 1..21: mol_type = other RNA
tgatctttaagaacattccct

SEQ ID NO: 27789 - RNA, 21 nt, synthetic construct
  source 1..21: mol_type = other RNA
tgatgcacagcatggtttctg

SEQ ID NO: 27790 - RNA, 21 nt, synthetic construct
  source 1..21: mol_type = other RNA
tgcaagtgctgctgctgctcc

SEQ ID NO: 27791 - RNA, 21 nt, synthetic construct
  source 1..21: mol_type = other RNA
tgcacaaatacatatacactc

SEQ ID NO: 27792 - RNA, 21 nt, synthetic construct
  source 1..21: mol_type = other RNA
tgcacagcatggtttctgaac

SEQ ID NO: 27793 - RNA, 21 nt, synthetic construct
  source 1..21: mol_type = other RNA
tgcagattgtttatatcagat

SEQ ID NO: 27794 - RNA, 21 nt, synthetic construct
  source 1..21: mol_type = other RNA
tgcagggaaactactggttca

SEQ ID NO: 27795 - RNA, 21 nt, synthetic construct
  source 1..21: mol_type = other RNA
tgcagttgagcagggagcagc

SEQ ID NO: 27796 - RNA, 21 nt, synthetic construct
  source 1..21: mol_type = other RNA
tgcatattgggattgtcaggg

SEQ ID NO: 27797 - RNA, 21 nt, synthetic construct
  source 1..21: mol_type = other RNA
tgcatcagtatctcagcaggt

SEQ ID NO: 27798 - RNA, 21 nt, synthetic construct
  source 1..21: mol_type = other RNA
tgccacaaaagctagaggaag

SEQ ID NO: 27799 - RNA, 21 nt, synthetic construct
  source 1..21: mol_type = other RNA
tgccactaatctgatctttaa

SEQ ID NO: 27800 - RNA, 21 nt, synthetic construct
  source 1..21: mol_type = other RNA
tgccagccttatttctaacca

SEQ ID NO: 27801 - RNA, 21 nt, synthetic construct
  source 1..21: mol_type = other RNA
tgctaaatatacctgaagctg

SEQ ID NO: 27802 - RNA, 21 nt, synthetic construct
  source 1..21: mol_type = other RNA
tgctaggacagcaggacttac

SEQ ID NO: 27803 - RNA, 21 nt, synthetic construct
  source 1..21: mol_type = other RNA
tgctcaactgcagggaaacta

SEQ ID NO: 27804 - RNA, 21 nt, synthetic construct
  source 1..21: mol_type = other RNA
tgctccctgctcaactgcagg

SEQ ID NO: 27805 - RNA, 21 nt, synthetic construct
  source 1..21: mol_type = other RNA
tgctgaaagttgtgtatgagt

SEQ ID NO: 27806 - RNA, 21 nt, synthetic construct
  source 1..21: mol_type = other RNA
tgctgagatactgatgcacag

SEQ ID NO: 27807 - RNA, 21 nt, synthetic construct
  source 1..21: mol_type = other RNA
tgctgctccctgctcaactgc

SEQ ID NO: 27808 - RNA, 21 nt, synthetic construct
  source 1..21: mol_type = other RNA
tgctgctgctccctgctcaac

SEQ ID NO: 27809 - RNA, 21 nt, synthetic construct
  source 1..21: mol_type = other RNA
tgctgctgctgctccctgctc

SEQ ID NO: 27810 - RNA, 21 nt, synthetic construct
  source 1..21: mol_type = other RNA
tgctgggtagctctaaacaat

SEQ ID NO: 27811 - RNA, 21 nt, synthetic construct
  source 1..21: mol_type = other RNA
tgctgtcctagcatcctataa

SEQ ID NO: 27812 - RNA, 21 nt, synthetic construct
  source 1..21: mol_type = other RNA
tgctgtgcatcagtatctcag

SEQ ID NO: 27813 - RNA, 21 nt, synthetic construct
  source 1..21: mol_type = other RNA
tgctgttcctacccatgaata

SEQ ID NO: 27814 - RNA, 21 nt, synthetic construct
  source 1..21: mol_type = other RNA
tgctttgatataaaaaaggtc

SEQ ID NO: 27815 - RNA, 21 nt, synthetic construct
  source 1..21: mol_type = other RNA
tggacttctccagtactttct

SEQ ID NO: 27816 - RNA, 21 nt, synthetic construct
  source 1..21: mol_type = other RNA
tggagaagtccaggattatag

SEQ ID NO: 27817 - RNA, 21 nt, synthetic construct
  source 1..21: mol_type = other RNA
tggattggtatctgaggctag

SEQ ID NO: 27818 - RNA, 21 nt, synthetic construct
  source 1..21: mol_type = other RNA
tggcacctgctgagatactga

SEQ ID NO: 27819 - RNA, 21 nt, synthetic construct
  source 1..21: mol_type = other RNA
tggcagaataggctgctgttc

SEQ ID NO: 27820 - RNA, 21 nt, synthetic construct
  source 1..21: mol_type = other RNA
tggcagcttcaggtatattta

SEQ ID NO: 27821 - RNA, 21 nt, synthetic construct
  source 1..21: mol_type = other RNA
tggccatactaccctgaatga

SEQ ID NO: 27822 - RNA, 21 nt, synthetic construct
  source 1..21: mol_type = other RNA
tggccatagaccttttttata

SEQ ID NO: 27823 - RNA, 21 nt, synthetic construct
  source 1..21: mol_type = other RNA
tggctggattggtatctgagg

SEQ ID NO: 27824 - RNA, 21 nt, synthetic construct
  source 1..21: mol_type = other RNA
tggcttcctctagcttttgtg

SEQ ID NO: 27825 - RNA, 21 nt, synthetic construct
  source 1..21: mol_type = other RNA
tgggactcattcagggtagta

SEQ ID NO: 27826 - RNA, 21 nt, synthetic construct
  source 1..21: mol_type = other RNA
tgggatgggactcattcaggg

SEQ ID NO: 27827 - RNA, 21 nt, synthetic construct
  source 1..21: mol_type = other RNA
tgggattgtcagggaatgttc

SEQ ID NO: 27828 - RNA, 21 nt, synthetic construct
  source 1..21: mol_type = other RNA
tgggtagctctaaacaatgta

SEQ ID NO: 27829 - RNA, 21 nt, synthetic construct
  source 1..21: mol_type = other RNA
tgggtaggaacagcagcctat

SEQ ID NO: 27830 - RNA, 21 nt, synthetic construct
  source 1..21: mol_type = other RNA
tggtatctgaggctagtagga

SEQ ID NO: 27831 - RNA, 21 nt, synthetic construct
  source 1..21: mol_type = other RNA
tggttagaaataaggctggca

SEQ ID NO: 27832 - RNA, 21 nt, synthetic construct
  source 1..21: mol_type = other RNA
tggttcagaaaccatgctgtg

SEQ ID NO: 27833 - RNA, 21 nt, synthetic construct
  source 1..21: mol_type = other RNA
tggtttctgaaccagtagttt

SEQ ID NO: 27834 - RNA, 21 nt, synthetic construct
  source 1..21: mol_type = other RNA
tgtaagctgctgaaagttgtg

SEQ ID NO: 27835 - RNA, 21 nt, synthetic construct
  source 1..21: mol_type = other RNA
tgtaagtcctgctgtcctagc

SEQ ID NO: 27836 - RNA, 21 nt, synthetic construct
  source 1..21: mol_type = other RNA
tgtatatgtatttgtgcaagt

SEQ ID NO: 27837 - RNA, 21 nt, synthetic construct
  source 1..21: mol_type = other RNA
tgtatgagtagtcatatcata

SEQ ID NO: 27838 - RNA, 21 nt, synthetic construct
  source 1..21: mol_type = other RNA
tgtattcatgggtaggaacag

SEQ ID NO: 27839 - RNA, 21 nt, synthetic construct
  source 1..21: mol_type = other RNA
tgtatttgtgcaagtgctgct

SEQ ID NO: 27840 - RNA, 21 nt, synthetic construct
  source 1..21: mol_type = other RNA
tgtcagggaatgttcttaaag

SEQ ID NO: 27841 - RNA, 21 nt, synthetic construct
  source 1..21: mol_type = other RNA
tgtcctagcatcctataatcc

SEQ ID NO: 27842 - RNA, 21 nt, synthetic construct
  source 1..21: mol_type = other RNA
tgtgcaagtgctgctgctgct

SEQ ID NO: 27843 - RNA, 21 nt, synthetic construct
  source 1..21: mol_type = other RNA
tgtgcatcagtatctcagcag

SEQ ID NO: 27844 - RNA, 21 nt, synthetic construct
  source 1..21: mol_type = other RNA
tgtggcagcttcaggtatatt

SEQ ID NO: 27845 - RNA, 21 nt, synthetic construct
  source 1..21: mol_type = other RNA
tgtgtatgagtagtcatatca

SEQ ID NO: 27846 - RNA, 21 nt, synthetic construct
  source 1..21: mol_type = other RNA
tgttcctacccatgaatacat

SEQ ID NO: 27847 - RNA, 21 nt, synthetic construct
  source 1..21: mol_type = other RNA
tgttcctgctgggtagctcta

SEQ ID NO: 27848 - RNA, 21 nt, synthetic construct
  source 1..21: mol_type = other RNA
tgttcgttcagtgctaaatat

SEQ ID NO: 27849 - RNA, 21 nt, synthetic construct
  source 1..21: mol_type = other RNA
tgttcttaaagatcagattag

SEQ ID NO: 27850 - RNA, 21 nt, synthetic construct
  source 1..21: mol_type = other RNA
tgtttagagctacccagcagg

SEQ ID NO: 27851 - RNA, 21 nt, synthetic construct
  source 1..21: mol_type = other RNA
tgtttatatcagatgggatgg

SEQ ID NO: 27852 - RNA, 21 nt, synthetic construct
  source 1..21: mol_type = other RNA
tgtttgtaagtcctgctgtcc

SEQ ID NO: 27853 - RNA, 21 nt, synthetic construct
  source 1..21: mol_type = other RNA
ttaaagatcagattagtggca

SEQ ID NO: 27854 - RNA, 21 nt, synthetic construct
  source 1..21: mol_type = other RNA
ttaacacttcttacctactgg

SEQ ID NO: 27855 - RNA, 21 nt, synthetic construct
  source 1..21: mol_type = other RNA
ttaagaacattccctgacaat

SEQ ID NO: 27856 - RNA, 21 nt, synthetic construct
  source 1..21: mol_type = other RNA
ttacaaacaaaggcctatacc

SEQ ID NO: 27857 - RNA, 21 nt, synthetic construct
  source 1..21: mol_type = other RNA
ttacattcttttgtaagctgc

SEQ ID NO: 27858 - RNA, 21 nt, synthetic construct
  source 1..21: mol_type = other RNA
ttacctactggcttcctctag

SEQ ID NO: 27859 - RNA, 21 nt, synthetic construct
  source 1..21: mol_type = other RNA
ttagaaataaggctggcagaa

SEQ ID NO: 27860 - RNA, 21 nt, synthetic construct
  source 1..21: mol_type = other RNA
ttagacatttgttagtacatg

SEQ ID NO: 27861 - RNA, 21 nt, synthetic construct
  source 1..21: mol_type = other RNA
ttagagctacccagcaggaac

SEQ ID NO: 27862 - RNA, 21 nt, synthetic construct
  source 1..21: mol_type = other RNA
ttagcactgaacgaacatctc

SEQ ID NO: 27863 - RNA, 21 nt, synthetic construct
  source 1..21: mol_type = other RNA
ttagtggcacctgctgagata

SEQ ID NO: 27864 - RNA, 21 nt, synthetic construct
  source 1..21: mol_type = other RNA
ttataggatgctaggacagca

SEQ ID NO: 27865 - RNA, 21 nt, synthetic construct
  source 1..21: mol_type = other RNA
ttatatcaaagcagctttatg

SEQ ID NO: 27866 - RNA, 21 nt, synthetic construct
  source 1..21: mol_type = other RNA
ttatatcagatgggatgggac

SEQ ID NO: 27867 - RNA, 21 nt, synthetic construct
  source 1..21: mol_type = other RNA
ttatgatatgactactcatac

SEQ ID NO: 27868 - RNA, 21 nt, synthetic construct
  source 1..21: mol_type = other RNA
ttcagaaaccatgctgtgcat

SEQ ID NO: 27869 - RNA, 21 nt, synthetic construct
  source 1..21: mol_type = other RNA
ttcagcagcttacaaaagaat

SEQ ID NO: 27870 - RNA, 21 nt, synthetic construct
  source 1..21: mol_type = other RNA
ttcagggtagtatggccatag

SEQ ID NO: 27871 - RNA, 21 nt, synthetic construct
  source 1..21: mol_type = other RNA
ttcaggtatatttagcactga

SEQ ID NO: 27872 - RNA, 21 nt, synthetic construct
  source 1..21: mol_type = other RNA
ttcagtgctaaatatacctga

SEQ ID NO: 27873 - RNA, 21 nt, synthetic construct
  source 1..21: mol_type = other RNA
ttcatgggtaggaacagcagc

SEQ ID NO: 27874 - RNA, 21 nt, synthetic construct
  source 1..21: mol_type = other RNA
ttccctgacaatcccaatatg

SEQ ID NO: 27875 - RNA, 21 nt, synthetic construct
  source 1..21: mol_type = other RNA
ttccctgcagttgagcaggga

SEQ ID NO: 27876 - RNA, 21 nt, synthetic construct
  source 1..21: mol_type = other RNA
ttcctacccatgaatacattg

SEQ ID NO: 27877 - RNA, 21 nt, synthetic construct
  source 1..21: mol_type = other RNA
ttcctactagcctcagatacc

SEQ ID NO: 27878 - RNA, 21 nt, synthetic construct
  source 1..21: mol_type = other RNA
ttcctctagcttttgtggcag

SEQ ID NO: 27879 - RNA, 21 nt, synthetic construct
  source 1..21: mol_type = other RNA
ttcctgctgggtagctctaaa

SEQ ID NO: 27880 - RNA, 21 nt, synthetic construct
  source 1..21: mol_type = other RNA
ttcgttcagtgctaaatatac

SEQ ID NO: 27881 - RNA, 21 nt, synthetic construct
  source 1..21: mol_type = other RNA
ttctccagtactttctggctg

SEQ ID NO: 27882 - RNA, 21 nt, synthetic construct
  source 1..21: mol_type = other RNA
ttctgaaccagtagtttccct

SEQ ID NO: 27883 - RNA, 21 nt, synthetic construct
  source 1..21: mol_type = other RNA
ttctgccagccttatttctaa

SEQ ID NO: 27884 - RNA, 21 nt, synthetic construct
  source 1..21: mol_type = other RNA
ttctggctggattggtatctg

SEQ ID NO: 27885 - RNA, 21 nt, synthetic construct
  source 1..21: mol_type = other RNA
ttcttaaagatcagattagtg

SEQ ID NO: 27886 - RNA, 21 nt, synthetic construct
  source 1..21: mol_type = other RNA
ttcttacctactggcttcctc

SEQ ID NO: 27887 - RNA, 21 nt, synthetic construct
  source 1..21: mol_type = other RNA
ttcttgagatgttcgttcagt

SEQ ID NO: 27888 - RNA, 21 nt, synthetic construct
  source 1..21: mol_type = other RNA
ttcttttgtaagctgctgaaa

SEQ ID NO: 27889 - RNA, 21 nt, synthetic construct
  source 1..21: mol_type = other RNA
ttgagatgttcgttcagtgct

SEQ ID NO: 27890 - RNA, 21 nt, synthetic construct
  source 1..21: mol_type = other RNA
ttgagcagggagcagcagcag

SEQ ID NO: 27891 - RNA, 21 nt, synthetic construct
  source 1..21: mol_type = other RNA
ttgcacaaatacatatacact

SEQ ID NO: 27892 - RNA, 21 nt, synthetic construct
  source 1..21: mol_type = other RNA
ttgggattgtcagggaatgtt

SEQ ID NO: 27893 - RNA, 21 nt, synthetic construct
  source 1..21: mol_type = other RNA
ttggtatctgaggctagtagg

SEQ ID NO: 27894 - RNA, 21 nt, synthetic construct
  source 1..21: mol_type = other RNA
ttgtaagctgctgaaagttgt

SEQ ID NO: 27895 - RNA, 21 nt, synthetic construct
  source 1..21: mol_type = other RNA
ttgtaagtcctgctgtcctag

SEQ ID NO: 27896 - RNA, 21 nt, synthetic construct
  source 1..21: mol_type = other RNA
ttgtcagggaatgttcttaaa

SEQ ID NO: 27897 - RNA, 21 nt, synthetic construct
  source 1..21: mol_type = other RNA
ttgtgcaagtgctgctgctgc

SEQ ID NO: 27898 - RNA, 21 nt, synthetic construct
  source 1..21: mol_type = other RNA
ttgtggcagcttcaggtatat

SEQ ID NO: 27899 - RNA, 21 nt, synthetic construct
  source 1..21: mol_type = other RNA
ttgtgtatgagtagtcatatc

SEQ ID NO: 27900 - RNA, 21 nt, synthetic construct
  source 1..21: mol_type = other RNA
ttgttcctgctgggtagctct

SEQ ID NO: 27901 - RNA, 21 nt, synthetic construct
  source 1..21: mol_type = other RNA
ttgtttagagctacccagcag

SEQ ID NO: 27902 - RNA, 21 nt, synthetic construct
  source 1..21: mol_type = other RNA
ttgtttatatcagatgggatg

SEQ ID NO: 27903 - RNA, 21 nt, synthetic construct
  source 1..21: mol_type = other RNA
ttgtttgtaagtcctgctgtc

SEQ ID NO: 27904 - RNA, 21 nt, synthetic construct
  source 1..21: mol_type = other RNA
tttaagaacattccctgacaa

SEQ ID NO: 27905 - RNA, 21 nt, synthetic construct
  source 1..21: mol_type = other RNA
tttagagctacccagcaggaa

SEQ ID NO: 27906 - RNA, 21 nt, synthetic construct
  source 1..21: mol_type = other RNA
tttagcactgaacgaacatct

SEQ ID NO: 27907 - RNA, 21 nt, synthetic construct
  source 1..21: mol_type = other RNA
tttatatcagatgggatggga

SEQ ID NO: 27908 - RNA, 21 nt, synthetic construct
  source 1..21: mol_type = other RNA
tttcagcagcttacaaaagaa

SEQ ID NO: 27909 - RNA, 21 nt, synthetic construct
  source 1..21: mol_type = other RNA
tttccctgcagttgagcaggg

SEQ ID NO: 27910 - RNA, 21 nt, synthetic construct
  source 1..21: mol_type = other RNA
tttctgaaccagtagtttccc

SEQ ID NO: 27911 - RNA, 21 nt, synthetic construct
  source 1..21: mol_type = other RNA
tttctggctggattggtatct

SEQ ID NO: 27912 - RNA, 21 nt, synthetic construct
  source 1..21: mol_type = other RNA
tttgtaagctgctgaaagttg

SEQ ID NO: 27913 - RNA, 21 nt, synthetic construct
  source 1..21: mol_type = other RNA
tttgtaagtcctgctgtccta

SEQ ID NO: 27914 - RNA, 21 nt, synthetic construct
  source 1..21: mol_type = other RNA
tttgtgcaagtgctgctgctg

SEQ ID NO: 27915 - RNA, 21 nt, synthetic construct
  source 1..21: mol_type = other RNA
tttgtggcagcttcaggtata

SEQ ID NO: 27916 - RNA, 21 nt, synthetic construct
  source 1..21: mol_type = other RNA
tttgtttgtaagtcctgctgt

SEQ ID NO: 27917 - RNA, 21 nt, synthetic construct
  source 1..21: mol_type = other RNA
ttttgtaagctgctgaaagtt

SEQ ID NO: 27918 - RNA, 21 nt, synthetic construct
  source 1..21: mol_type = other RNA
ttttgtggcagcttcaggtat

SEQ ID NO: 27919 - RNA, 22 nt, synthetic construct
  source 1..22: mol_type = other RNA
aaaaaaggtctatggccatact

SEQ ID NO: 27920 - RNA, 22 nt, synthetic construct
  source 1..22: mol_type = other RNA
aaaaaggtctatggccatacta

SEQ ID NO: 27921 - RNA, 22 nt, synthetic construct
  source 1..22: mol_type = other RNA
aaaagctagaggaagccagtag

SEQ ID NO: 27922 - RNA, 22 nt, synthetic construct
  source 1..22: mol_type = other RNA
aaaaggtctatggccatactac

SEQ ID NO: 27923 - RNA, 22 nt, synthetic construct
  source 1..22: mol_type = other RNA
aaaatggttagaaataaggctg

SEQ ID NO: 27924 - RNA, 22 nt, synthetic construct
  source 1..22: mol_type = other RNA
aaacaaaggcctataccttctt

SEQ ID NO: 27925 - RNA, 22 nt, synthetic construct
  source 1..22: mol_type = other RNA
aaacaatctgcatattgggatt

SEQ ID NO: 27926 - RNA, 22 nt, synthetic construct
  source 1..22: mol_type = other RNA
aaacaatgtattcatgggtagg

SEQ ID NO: 27927 - RNA, 22 nt, synthetic construct
  source 1..22: mol_type = other RNA
aaaccatgctgtgcatcagtat

SEQ ID NO: 27928 - RNA, 22 nt, synthetic construct
  source 1..22: mol_type = other RNA
aaactactggttcagaaaccat

SEQ ID NO: 27929 - RNA, 22 nt, synthetic construct
  source 1..22: mol_type = other RNA
aaagatcagattagtggcacct

SEQ ID NO: 27930 - RNA, 22 nt, synthetic construct
  source 1..22: mol_type = other RNA
aaagcagctttatgatatgact

SEQ ID NO: 27931 - RNA, 22 nt, synthetic construct
  source 1..22: mol_type = other RNA
aaagctagaggaagccagtagg

SEQ ID NO: 27932 - RNA, 22 nt, synthetic construct
  source 1..22: mol_type = other RNA
aaaggaagacattaagttttac

SEQ ID NO: 27933 - RNA, 22 nt, synthetic construct
  source 1..22: mol_type = other RNA
aaaggcctataccttcttgaga

SEQ ID NO: 27934 - RNA, 22 nt, synthetic construct
  source 1..22: mol_type = other RNA
aaaggtctatggccatactacc

SEQ ID NO: 27935 - RNA, 22 nt, synthetic construct
  source 1..22: mol_type = other RNA
aaagtaaaacttaatgtcttcc

SEQ ID NO: 27936 - RNA, 22 nt, synthetic construct
  source 1..22: mol_type = other RNA
aaagtactggagaagtccagga

SEQ ID NO: 27937 - RNA, 22 nt, synthetic construct
  source 1..22: mol_type = other RNA
aaagttgtgtatgagtagtcat

SEQ ID NO: 27938 - RNA, 22 nt, synthetic construct
  source 1..22: mol_type = other RNA
aaataaggctggcagaataggc

SEQ ID NO: 27939 - RNA, 22 nt, synthetic construct
  source 1..22: mol_type = other RNA
aaataccatgtactaacaaatg

SEQ ID NO: 27940 - RNA, 22 nt, synthetic construct
  source 1..22: mol_type = other RNA
aaatatacctgaagctgccaca

SEQ ID NO: 27941 - RNA, 22 nt, synthetic construct
  source 1..22: mol_type = other RNA
aaatggttagaaataaggctgg

SEQ ID NO: 27942 - RNA, 22 nt, synthetic construct
  source 1..22: mol_type = other RNA
aacaaaggcctataccttcttg

SEQ ID NO: 27943 - RNA, 22 nt, synthetic construct
  source 1..22: mol_type = other RNA
aacaaatgtctaaaatggttag

SEQ ID NO: 27944 - RNA, 22 nt, synthetic construct
  source 1..22: mol_type = other RNA
aacaagcccttcctactagcct

SEQ ID NO: 27945 - RNA, 22 nt, synthetic construct
  source 1..22: mol_type = other RNA
aacaatctgcatattgggattg

SEQ ID NO: 27946 - RNA, 22 nt, synthetic construct
  source 1..22: mol_type = other RNA
aacaatgtattcatgggtagga

SEQ ID NO: 27947 - RNA, 22 nt, synthetic construct
  source 1..22: mol_type = other RNA
aacacttcttacctactggctt

SEQ ID NO: 27948 - RNA, 22 nt, synthetic construct
  source 1..22: mol_type = other RNA
aacagcagcctattctgccagc

SEQ ID NO: 27949 - RNA, 22 nt, synthetic construct
  source 1..22: mol_type = other RNA
aacatctcaagaaggtataggc

SEQ ID NO: 27950 - RNA, 22 nt, synthetic construct
  source 1..22: mol_type = other RNA
aacattccctgacaatcccaat

SEQ ID NO: 27951 - RNA, 22 nt, synthetic construct
  source 1..22: mol_type = other RNA
aaccagtagtttccctgcagtt

SEQ ID NO: 27952 - RNA, 22 nt, synthetic construct
  source 1..22: mol_type = other RNA
aaccatgctgtgcatcagtatc

SEQ ID NO: 27953 - RNA, 22 nt, synthetic construct
  source 1..22: mol_type = other RNA
aaccattttagacatttgttag

SEQ ID NO: 27954 - RNA, 22 nt, synthetic construct
  source 1..22: mol_type = other RNA
aacgaacatctcaagaaggtat

SEQ ID NO: 27955 - RNA, 22 nt, synthetic construct
  source 1..22: mol_type = other RNA
aactactggttcagaaaccatg

SEQ ID NO: 27956 - RNA, 22 nt, synthetic construct
  source 1..22: mol_type = other RNA
aactgcagggaaactactggtt

SEQ ID NO: 27957 - RNA, 22 nt, synthetic construct
  source 1..22: mol_type = other RNA
aactttcagcagcttacaaaag

SEQ ID NO: 27958 - RNA, 22 nt, synthetic construct
  source 1..22: mol_type = other RNA
aagaacattccctgacaatccc

SEQ ID NO: 27959 - RNA, 22 nt, synthetic construct
  source 1..22: mol_type = other RNA
aagaaggtataggcctttgttt

SEQ ID NO: 27960 - RNA, 22 nt, synthetic construct
  source 1..22: mol_type = other RNA
aagaagtgttaagagtgtatat

SEQ ID NO: 27961 - RNA, 22 nt, synthetic construct
  source 1..22: mol_type = other RNA
aagagtgtatatgtatttgtgc

SEQ ID NO: 27962 - RNA, 22 nt, synthetic construct
  source 1..22: mol_type = other RNA
aagatcagattagtggcacctg

SEQ ID NO: 27963 - RNA, 22 nt, synthetic construct
  source 1..22: mol_type = other RNA
aagcagctttatgatatgacta

SEQ ID NO: 27964 - RNA, 22 nt, synthetic construct
  source 1..22: mol_type = other RNA
aagccagtaggtaagaagtgtt

SEQ ID NO: 27965 - RNA, 22 nt, synthetic construct
  source 1..22: mol_type = other RNA
aagcccttcctactagcctcag

SEQ ID NO: 27966 - RNA, 22 nt, synthetic construct
  source 1..22: mol_type = other RNA
aagctagaggaagccagtaggt

SEQ ID NO: 27967 - RNA, 22 nt, synthetic construct
  source 1..22: mol_type = other RNA
aagctgccacaaaagctagagg

SEQ ID NO: 27968 - RNA, 22 nt, synthetic construct
  source 1..22: mol_type = other RNA
aagctgctgaaagttgtgtatg

SEQ ID NO: 27969 - RNA, 22 nt, synthetic construct
  source 1..22: mol_type = other RNA
aagctgctttgatataaaaaag

SEQ ID NO: 27970 - RNA, 22 nt, synthetic construct
  source 1..22: mol_type = other RNA
aaggaagacattaagttttact

SEQ ID NO: 27971 - RNA, 22 nt, synthetic construct
  source 1..22: mol_type = other RNA
aaggcctataccttcttgagat

SEQ ID NO: 27972 - RNA, 22 nt, synthetic construct
  source 1..22: mol_type = other RNA
aaggctggcagaataggctgct

SEQ ID NO: 27973 - RNA, 22 nt, synthetic construct
  source 1..22: mol_type = other RNA
aagggcttgttcctgctgggta

SEQ ID NO: 27974 - RNA, 22 nt, synthetic construct
  source 1..22: mol_type = other RNA
aaggtataggcctttgtttgta

SEQ ID NO: 27975 - RNA, 22 nt, synthetic construct
  source 1..22: mol_type = other RNA
aaggtctatggccatactaccc

SEQ ID NO: 27976 - RNA, 22 nt, synthetic construct
  source 1..22: mol_type = other RNA
aagtaaaacttaatgtcttcct

SEQ ID NO: 27977 - RNA, 22 nt, synthetic construct
  source 1..22: mol_type = other RNA
aagtactggagaagtccaggat

SEQ ID NO: 27978 - RNA, 22 nt, synthetic construct
  source 1..22: mol_type = other RNA
aagtccaggattataggatgct

SEQ ID NO: 27979 - RNA, 22 nt, synthetic construct
  source 1..22: mol_type = other RNA
aagtcctgctgtcctagcatcc

SEQ ID NO: 27980 - RNA, 22 nt, synthetic construct
  source 1..22: mol_type = other RNA
aagtcttacattcttttgtaag

SEQ ID NO: 27981 - RNA, 22 nt, synthetic construct
  source 1..22: mol_type = other RNA
aagtgctgctgctgctccctgc

SEQ ID NO: 27982 - RNA, 22 nt, synthetic construct
  source 1..22: mol_type = other RNA
aagtgttaagagtgtatatgta

SEQ ID NO: 27983 - RNA, 22 nt, synthetic construct
  source 1..22: mol_type = other RNA
aagttgtgtatgagtagtcata

SEQ ID NO: 27984 - RNA, 22 nt, synthetic construct
  source 1..22: mol_type = other RNA
aataaggctggcagaataggct

SEQ ID NO: 27985 - RNA, 22 nt, synthetic construct
  source 1..22: mol_type = other RNA
aatacatatacactcttaacac

SEQ ID NO: 27986 - RNA, 22 nt, synthetic construct
  source 1..22: mol_type = other RNA
aatacattgtttagagctaccc

SEQ ID NO: 27987 - RNA, 22 nt, synthetic construct
  source 1..22: mol_type = other RNA
aataccatgtactaacaaatgt

SEQ ID NO: 27988 - RNA, 22 nt, synthetic construct
  source 1..22: mol_type = other RNA
aataggctgctgttcctaccca

SEQ ID NO: 27989 - RNA, 22 nt, synthetic construct
  source 1..22: mol_type = other RNA
aatatacctgaagctgccacaa

SEQ ID NO: 27990 - RNA, 22 nt, synthetic construct
  source 1..22: mol_type = other RNA
aatccagccagaaagtactgga

SEQ ID NO: 27991 - RNA, 22 nt, synthetic construct
  source 1..22: mol_type = other RNA
aatcccaatatgcagattgttt

SEQ ID NO: 27992 - RNA, 22 nt, synthetic construct
  source 1..22: mol_type = other RNA
aatcctggacttctccagtact

SEQ ID NO: 27993 - RNA, 22 nt, synthetic construct
  source 1..22: mol_type = other RNA
aatctgatctttaagaacattc

SEQ ID NO: 27994 - RNA, 22 nt, synthetic construct
  source 1..22: mol_type = other RNA
aatctgcatattgggattgtca

SEQ ID NO: 27995 - RNA, 22 nt, synthetic construct
  source 1..22: mol_type = other RNA
aatgagtcccatcccatctgat

SEQ ID NO: 27996 - RNA, 22 nt, synthetic construct
  source 1..22: mol_type = other RNA
aatggttagaaataaggctggc

SEQ ID NO: 27997 - RNA, 22 nt, synthetic construct
  source 1..22: mol_type = other RNA
aatgtattcatgggtaggaaca

SEQ ID NO: 27998 - RNA, 22 nt, synthetic construct
  source 1..22: mol_type = other RNA
acaaaagctagaggaagccagt

SEQ ID NO: 27999 - RNA, 22 nt, synthetic construct
  source 1..22: mol_type = other RNA
acaaacaaaggcctataccttc

SEQ ID NO: 28000 - RNA, 22 nt, synthetic construct
  source 1..22: mol_type = other RNA
acaaaggcctataccttcttga

SEQ ID NO: 28001 - RNA, 22 nt, synthetic construct
  source 1..22: mol_type = other RNA
acaaatgtctaaaatggttaga

SEQ ID NO: 28002 - RNA, 22 nt, synthetic construct
  source 1..22: mol_type = other RNA
acaactttcagcagcttacaaa

SEQ ID NO: 28003 - RNA, 22 nt, synthetic construct
  source 1..22: mol_type = other RNA
acaagcccttcctactagcctc

SEQ ID NO: 28004 - RNA, 22 nt, synthetic construct
  source 1..22: mol_type = other RNA
acaatcccaatatgcagattgt

SEQ ID NO: 28005 - RNA, 22 nt, synthetic construct
  source 1..22: mol_type = other RNA
acaatctgcatattgggattgt

SEQ ID NO: 28006 - RNA, 22 nt, synthetic construct
  source 1..22: mol_type = other RNA
acaatgtattcatgggtaggaa

SEQ ID NO: 28007 - RNA, 22 nt, synthetic construct
  source 1..22: mol_type = other RNA
acacaactttcagcagcttaca

SEQ ID NO: 28008 - RNA, 22 nt, synthetic construct
  source 1..22: mol_type = other RNA
acactcttaacacttcttacct

SEQ ID NO: 28009 - RNA, 22 nt, synthetic construct
  source 1..22: mol_type = other RNA
acacttcttacctactggcttc

SEQ ID NO: 28010 - RNA, 22 nt, synthetic construct
  source 1..22: mol_type = other RNA
acagcagcctattctgccagcc

SEQ ID NO: 28011 - RNA, 22 nt, synthetic construct
  source 1..22: mol_type = other RNA
acagcaggacttacaaacaaag

SEQ ID NO: 28012 - RNA, 22 nt, synthetic construct
  source 1..22: mol_type = other RNA
acagcatggtttctgaaccagt

SEQ ID NO: 28013 - RNA, 22 nt, synthetic construct
  source 1..22: mol_type = other RNA
acatatacactcttaacacttc

SEQ ID NO: 28014 - RNA, 22 nt, synthetic construct
  source 1..22: mol_type = other RNA
acatctcaagaaggtataggcc

SEQ ID NO: 28015 - RNA, 22 nt, synthetic construct
  source 1..22: mol_type = other RNA
acattccctgacaatcccaata

SEQ ID NO: 28016 - RNA, 22 nt, synthetic construct
  source 1..22: mol_type = other RNA
acattcttttgtaagctgctga

SEQ ID NO: 28017 - RNA, 22 nt, synthetic construct
  source 1..22: mol_type = other RNA
acattgtttagagctacccagc

SEQ ID NO: 28018 - RNA, 22 nt, synthetic construct
  source 1..22: mol_type = other RNA
acatttgttagtacatggtatt

SEQ ID NO: 28019 - RNA, 22 nt, synthetic construct
  source 1..22: mol_type = other RNA
accaatccagccagaaagtact

SEQ ID NO: 28020 - RNA, 22 nt, synthetic construct
  source 1..22: mol_type = other RNA
accagtagtttccctgcagttg

SEQ ID NO: 28021 - RNA, 22 nt, synthetic construct
  source 1..22: mol_type = other RNA
accatgctgtgcatcagtatct

SEQ ID NO: 28022 - RNA, 22 nt, synthetic construct
  source 1..22: mol_type = other RNA
accatgtactaacaaatgtcta

SEQ ID NO: 28023 - RNA, 22 nt, synthetic construct
  source 1..22: mol_type = other RNA
accattttagacatttgttagt

SEQ ID NO: 28024 - RNA, 22 nt, synthetic construct
  source 1..22: mol_type = other RNA
acccagcaggaacaagcccttc

SEQ ID NO: 28025 - RNA, 22 nt, synthetic construct
  source 1..22: mol_type = other RNA
acccatgaatacattgtttaga

SEQ ID NO: 28026 - RNA, 22 nt, synthetic construct
  source 1..22: mol_type = other RNA
accctgaatgagtcccatccca

SEQ ID NO: 28027 - RNA, 22 nt, synthetic construct
  source 1..22: mol_type = other RNA
acctactggcttcctctagctt

SEQ ID NO: 28028 - RNA, 22 nt, synthetic construct
  source 1..22: mol_type = other RNA
acctgaagctgccacaaaagct

SEQ ID NO: 28029 - RNA, 22 nt, synthetic construct
  source 1..22: mol_type = other RNA
acctgctgagatactgatgcac

SEQ ID NO: 28030 - RNA, 22 nt, synthetic construct
  source 1..22: mol_type = other RNA
accttcttgagatgttcgttca

SEQ ID NO: 28031 - RNA, 22 nt, synthetic construct
  source 1..22: mol_type = other RNA
accttttttatatcaaagcagc

SEQ ID NO: 28032 - RNA, 22 nt, synthetic construct
  source 1..22: mol_type = other RNA
acgaacatctcaagaaggtata

SEQ ID NO: 28033 - RNA, 22 nt, synthetic construct
  source 1..22: mol_type = other RNA
actaacaaatgtctaaaatggt

SEQ ID NO: 28034 - RNA, 22 nt, synthetic construct
  source 1..22: mol_type = other RNA
actaatctgatctttaagaaca

SEQ ID NO: 28035 - RNA, 22 nt, synthetic construct
  source 1..22: mol_type = other RNA
actaccctgaatgagtcccatc

SEQ ID NO: 28036 - RNA, 22 nt, synthetic construct
  source 1..22: mol_type = other RNA
actactcatacacaactttcag

SEQ ID NO: 28037 - RNA, 22 nt, synthetic construct
  source 1..22: mol_type = other RNA
actactggttcagaaaccatgc

SEQ ID NO: 28038 - RNA, 22 nt, synthetic construct
  source 1..22: mol_type = other RNA
actagcctcagataccaatcca

SEQ ID NO: 28039 - RNA, 22 nt, synthetic construct
  source 1..22: mol_type = other RNA
actcatacacaactttcagcag

SEQ ID NO: 28040 - RNA, 22 nt, synthetic construct
  source 1..22: mol_type = other RNA
actcattcagggtagtatggcc

SEQ ID NO: 28041 - RNA, 22 nt, synthetic construct
  source 1..22: mol_type = other RNA
actcttaacacttcttacctac

SEQ ID NO: 28042 - RNA, 22 nt, synthetic construct
  source 1..22: mol_type = other RNA
actgaacgaacatctcaagaag

SEQ ID NO: 28043 - RNA, 22 nt, synthetic construct
  source 1..22: mol_type = other RNA
actgatgcacagcatggtttct

SEQ ID NO: 28044 - RNA, 22 nt, synthetic construct
  source 1..22: mol_type = other RNA
actgcagggaaactactggttc

SEQ ID NO: 28045 - RNA, 22 nt, synthetic construct
  source 1..22: mol_type = other RNA
actggagaagtccaggattata

SEQ ID NO: 28046 - RNA, 22 nt, synthetic construct
  source 1..22: mol_type = other RNA
actggcttcctctagcttttgt

SEQ ID NO: 28047 - RNA, 22 nt, synthetic construct
  source 1..22: mol_type = other RNA
actggttcagaaaccatgctgt

SEQ ID NO: 28048 - RNA, 22 nt, synthetic construct
  source 1..22: mol_type = other RNA
acttacaaacaaaggcctatac

SEQ ID NO: 28049 - RNA, 22 nt, synthetic construct
  source 1..22: mol_type = other RNA
acttctccagtactttctggct

SEQ ID NO: 28050 - RNA, 22 nt, synthetic construct
  source 1..22: mol_type = other RNA
acttcttacctactggcttcct

SEQ ID NO: 28051 - RNA, 22 nt, synthetic construct
  source 1..22: mol_type = other RNA
acttgcacaaatacatatacac

SEQ ID NO: 28052 - RNA, 22 nt, synthetic construct
  source 1..22: mol_type = other RNA
actttcagcagcttacaaaaga

SEQ ID NO: 28053 - RNA, 22 nt, synthetic construct
  source 1..22: mol_type = other RNA
actttctggctggattggtatc

SEQ ID NO: 28054 - RNA, 22 nt, synthetic construct
  source 1..22: mol_type = other RNA
agaaaccatgctgtgcatcagt

SEQ ID NO: 28055 - RNA, 22 nt, synthetic construct
  source 1..22: mol_type = other RNA
agaaagtactggagaagtccag

SEQ ID NO: 28056 - RNA, 22 nt, synthetic construct
  source 1..22: mol_type = other RNA
agaaataaggctggcagaatag

SEQ ID NO: 28057 - RNA, 22 nt, synthetic construct
  source 1..22: mol_type = other RNA
agaacattccctgacaatccca

SEQ ID NO: 28058 - RNA, 22 nt, synthetic construct
  source 1..22: mol_type = other RNA
agaaggtataggcctttgtttg

SEQ ID NO: 28059 - RNA, 22 nt, synthetic construct
  source 1..22: mol_type = other RNA
agaagtccaggattataggatg

SEQ ID NO: 28060 - RNA, 22 nt, synthetic construct
  source 1..22: mol_type = other RNA
agaagtgttaagagtgtatatg

SEQ ID NO: 28061 - RNA, 22 nt, synthetic construct
  source 1..22: mol_type = other RNA
agaataggctgctgttcctacc

SEQ ID NO: 28062 - RNA, 22 nt, synthetic construct
  source 1..22: mol_type = other RNA
agacatttgttagtacatggta

SEQ ID NO: 28063 - RNA, 22 nt, synthetic construct
  source 1..22: mol_type = other RNA
agaccttttttatatcaaagca

SEQ ID NO: 28064 - RNA, 22 nt, synthetic construct
  source 1..22: mol_type = other RNA
agagctacccagcaggaacaag

SEQ ID NO: 28065 - RNA, 22 nt, synthetic construct
  source 1..22: mol_type = other RNA
agaggaagccagtaggtaagaa

SEQ ID NO: 28066 - RNA, 22 nt, synthetic construct
  source 1..22: mol_type = other RNA
agagtgtatatgtatttgtgca

SEQ ID NO: 28067 - RNA, 22 nt, synthetic construct
  source 1..22: mol_type = other RNA
agataccaatccagccagaaag

SEQ ID NO: 28068 - RNA, 22 nt, synthetic construct
  source 1..22: mol_type = other RNA
agatactgatgcacagcatggt

SEQ ID NO: 28069 - RNA, 22 nt, synthetic construct
  source 1..22: mol_type = other RNA
agatcagattagtggcacctgc

SEQ ID NO: 28070 - RNA, 22 nt, synthetic construct
  source 1..22: mol_type = other RNA
agatgggatgggactcattcag

SEQ ID NO: 28071 - RNA, 22 nt, synthetic construct
  source 1..22: mol_type = other RNA
agatgttcgttcagtgctaaat

SEQ ID NO: 28072 - RNA, 22 nt, synthetic construct
  source 1..22: mol_type = other RNA
agattagtggcacctgctgaga

SEQ ID NO: 28073 - RNA, 22 nt, synthetic construct
  source 1..22: mol_type = other RNA
agattgtttatatcagatggga

SEQ ID NO: 28074 - RNA, 22 nt, synthetic construct
  source 1..22: mol_type = other RNA
agcactgaacgaacatctcaag

SEQ ID NO: 28075 - RNA, 22 nt, synthetic construct
  source 1..22: mol_type = other RNA
agcacttgcacaaatacatata

SEQ ID NO: 28076 - RNA, 22 nt, synthetic construct
  source 1..22: mol_type = other RNA
agcagcacttgcacaaatacat

SEQ ID NO: 28077 - RNA, 22 nt, synthetic construct
  source 1..22: mol_type = other RNA
agcagcagcacttgcacaaata

SEQ ID NO: 28078 - RNA, 22 nt, synthetic construct
  source 1..22: mol_type = other RNA
agcagcagcagcacttgcacaa

SEQ ID NO: 28079 - RNA, 22 nt, synthetic construct
  source 1..22: mol_type = other RNA
agcagcctattctgccagcctt

SEQ ID NO: 28080 - RNA, 22 nt, synthetic construct
  source 1..22: mol_type = other RNA
agcagctttatgatatgactac

SEQ ID NO: 28081 - RNA, 22 nt, synthetic construct
  source 1..22: mol_type = other RNA
agcaggaacaagcccttcctac

SEQ ID NO: 28082 - RNA, 22 nt, synthetic construct
  source 1..22: mol_type = other RNA
agcaggacttacaaacaaaggc

SEQ ID NO: 28083 - RNA, 22 nt, synthetic construct
  source 1..22: mol_type = other RNA
agcagggagcagcagcagcact

SEQ ID NO: 28084 - RNA, 22 nt, synthetic construct
  source 1..22: mol_type = other RNA
agcaggtgccactaatctgatc

SEQ ID NO: 28085 - RNA, 22 nt, synthetic construct
  source 1..22: mol_type = other RNA
agcatcctataatcctggactt

SEQ ID NO: 28086 - RNA, 22 nt, synthetic construct
  source 1..22: mol_type = other RNA
agcatggtttctgaaccagtag

SEQ ID NO: 28087 - RNA, 22 nt, synthetic construct
  source 1..22: mol_type = other RNA
agccagaaagtactggagaagt

SEQ ID NO: 28088 - RNA, 22 nt, synthetic construct
  source 1..22: mol_type = other RNA
agccagtaggtaagaagtgtta

SEQ ID NO: 28089 - RNA, 22 nt, synthetic construct
  source 1..22: mol_type = other RNA
agcccttcctactagcctcaga

SEQ ID NO: 28090 - RNA, 22 nt, synthetic construct
  source 1..22: mol_type = other RNA
agcctattctgccagccttatt

SEQ ID NO: 28091 - RNA, 22 nt, synthetic construct
  source 1..22: mol_type = other RNA
agcctcagataccaatccagcc

SEQ ID NO: 28092 - RNA, 22 nt, synthetic construct
  source 1..22: mol_type = other RNA
agccttatttctaaccatttta

SEQ ID NO: 28093 - RNA, 22 nt, synthetic construct
  source 1..22: mol_type = other RNA
agctacccagcaggaacaagcc

SEQ ID NO: 28094 - RNA, 22 nt, synthetic construct
  source 1..22: mol_type = other RNA
agctagaggaagccagtaggta

SEQ ID NO: 28095 - RNA, 22 nt, synthetic construct
  source 1..22: mol_type = other RNA
agctctaaacaatgtattcatg

SEQ ID NO: 28096 - RNA, 22 nt, synthetic construct
  source 1..22: mol_type = other RNA
agctgccacaaaagctagagga

SEQ ID NO: 28097 - RNA, 22 nt, synthetic construct
  source 1..22: mol_type = other RNA
agctgctgaaagttgtgtatga

SEQ ID NO: 28098 - RNA, 22 nt, synthetic construct
  source 1..22: mol_type = other RNA
agctgctttgatataaaaaagg

SEQ ID NO: 28099 - RNA, 22 nt, synthetic construct
  source 1..22: mol_type = other RNA
agcttcaggtatatttagcact

SEQ ID NO: 28100 - RNA, 22 nt, synthetic construct
  source 1..22: mol_type = other RNA
agctttatgatatgactactca

SEQ ID NO: 28101 - RNA, 22 nt, synthetic construct
  source 1..22: mol_type = other RNA
agcttttgtggcagcttcaggt

SEQ ID NO: 28102 - RNA, 22 nt, synthetic construct
  source 1..22: mol_type = other RNA
aggaacaagcccttcctactag

SEQ ID NO: 28103 - RNA, 22 nt, synthetic construct
  source 1..22: mol_type = other RNA
aggaacagcagcctattctgcc

SEQ ID NO: 28104 - RNA, 22 nt, synthetic construct
  source 1..22: mol_type = other RNA
aggaagacattaagttttactt

SEQ ID NO: 28105 - RNA, 22 nt, synthetic construct
  source 1..22: mol_type = other RNA
aggaagccagtaggtaagaagt

SEQ ID NO: 28106 - RNA, 22 nt, synthetic construct
  source 1..22: mol_type = other RNA
aggaagggcttgttcctgctgg

SEQ ID NO: 28107 - RNA, 22 nt, synthetic construct
  source 1..22: mol_type = other RNA
aggacagcaggacttacaaaca

SEQ ID NO: 28108 - RNA, 22 nt, synthetic construct
  source 1..22: mol_type = other RNA
aggacttacaaacaaaggccta

SEQ ID NO: 28109 - RNA, 22 nt, synthetic construct
  source 1..22: mol_type = other RNA
aggatgctaggacagcaggact

SEQ ID NO: 28110 - RNA, 22 nt, synthetic construct
  source 1..22: mol_type = other RNA
aggattataggatgctaggaca

SEQ ID NO: 28111 - RNA, 22 nt, synthetic construct
  source 1..22: mol_type = other RNA
aggcctataccttcttgagatg

SEQ ID NO: 28112 - RNA, 22 nt, synthetic construct
  source 1..22: mol_type = other RNA
aggcctttgtttgtaagtcctg

SEQ ID NO: 28113 - RNA, 22 nt, synthetic construct
  source 1..22: mol_type = other RNA
aggctagtaggaagggcttgtt

SEQ ID NO: 28114 - RNA, 22 nt, synthetic construct
  source 1..22: mol_type = other RNA
aggctgctgttcctacccatga

SEQ ID NO: 28115 - RNA, 22 nt, synthetic construct
  source 1..22: mol_type = other RNA
aggctggcagaataggctgctg

SEQ ID NO: 28116 - RNA, 22 nt, synthetic construct
  source 1..22: mol_type = other RNA
agggaaactactggttcagaaa

SEQ ID NO: 28117 - RNA, 22 nt, synthetic construct
  source 1..22: mol_type = other RNA
agggaatgttcttaaagatcag

SEQ ID NO: 28118 - RNA, 22 nt, synthetic construct
  source 1..22: mol_type = other RNA
agggagcagcagcagcacttgc

SEQ ID NO: 28119 - RNA, 22 nt, synthetic construct
  source 1..22: mol_type = other RNA
agggcttgttcctgctgggtag

SEQ ID NO: 28120 - RNA, 22 nt, synthetic construct
  source 1..22: mol_type = other RNA
agggtagtatggccatagacct

SEQ ID NO: 28121 - RNA, 22 nt, synthetic construct
  source 1..22: mol_type = other RNA
aggtaagaagtgttaagagtgt

SEQ ID NO: 28122 - RNA, 22 nt, synthetic construct
  source 1..22: mol_type = other RNA
aggtataggcctttgtttgtaa

SEQ ID NO: 28123 - RNA, 22 nt, synthetic construct
  source 1..22: mol_type = other RNA
aggtatatttagcactgaacga

SEQ ID NO: 28124 - RNA, 22 nt, synthetic construct
  source 1..22: mol_type = other RNA
aggtctatggccatactaccct

SEQ ID NO: 28125 - RNA, 22 nt, synthetic construct
  source 1..22: mol_type = other RNA
aggtgccactaatctgatcttt

SEQ ID NO: 28126 - RNA, 22 nt, synthetic construct
  source 1..22: mol_type = other RNA
agtaaaacttaatgtcttcctt

SEQ ID NO: 28127 - RNA, 22 nt, synthetic construct
  source 1..22: mol_type = other RNA
agtactggagaagtccaggatt

SEQ ID NO: 28128 - RNA, 22 nt, synthetic construct
  source 1..22: mol_type = other RNA
agtactttctggctggattggt

SEQ ID NO: 28129 - RNA, 22 nt, synthetic construct
  source 1..22: mol_type = other RNA
agtaggaagggcttgttcctgc

SEQ ID NO: 28130 - RNA, 22 nt, synthetic construct
  source 1..22: mol_type = other RNA
agtaggtaagaagtgttaagag

SEQ ID NO: 28131 - RNA, 22 nt, synthetic construct
  source 1..22: mol_type = other RNA
agtagtcatatcataaagctgc

SEQ ID NO: 28132 - RNA, 22 nt, synthetic construct
  source 1..22: mol_type = other RNA
agtagtttccctgcagttgagc

SEQ ID NO: 28133 - RNA, 22 nt, synthetic construct
  source 1..22: mol_type = other RNA
agtatctcagcaggtgccacta

SEQ ID NO: 28134 - RNA, 22 nt, synthetic construct
  source 1..22: mol_type = other RNA
agtatggccatagacctttttt

SEQ ID NO: 28135 - RNA, 22 nt, synthetic construct
  source 1..22: mol_type = other RNA
agtcatatcataaagctgcttt

SEQ ID NO: 28136 - RNA, 22 nt, synthetic construct
  source 1..22: mol_type = other RNA
agtccaggattataggatgcta

SEQ ID NO: 28137 - RNA, 22 nt, synthetic construct
  source 1..22: mol_type = other RNA
agtcccatcccatctgatataa

SEQ ID NO: 28138 - RNA, 22 nt, synthetic construct
  source 1..22: mol_type = other RNA
agtcctgctgtcctagcatcct

SEQ ID NO: 28139 - RNA, 22 nt, synthetic construct
  source 1..22: mol_type = other RNA
agtcttacattcttttgtaagc

SEQ ID NO: 28140 - RNA, 22 nt, synthetic construct
  source 1..22: mol_type = other RNA
agtgctaaatatacctgaagct

SEQ ID NO: 28141 - RNA, 22 nt, synthetic construct
  source 1..22: mol_type = other RNA
agtgctgctgctgctccctgct

SEQ ID NO: 28142 - RNA, 22 nt, synthetic construct
  source 1..22: mol_type = other RNA
agtggcacctgctgagatactg

SEQ ID NO: 28143 - RNA, 22 nt, synthetic construct
  source 1..22: mol_type = other RNA
agtgtatatgtatttgtgcaag

SEQ ID NO: 28144 - RNA, 22 nt, synthetic construct
  source 1..22: mol_type = other RNA
agtgttaagagtgtatatgtat

SEQ ID NO: 28145 - RNA, 22 nt, synthetic construct
  source 1..22: mol_type = other RNA
agttgagcagggagcagcagca

SEQ ID NO: 28146 - RNA, 22 nt, synthetic construct
  source 1..22: mol_type = other RNA
agttgtgtatgagtagtcatat

SEQ ID NO: 28147 - RNA, 22 nt, synthetic construct
  source 1..22: mol_type = other RNA
agtttccctgcagttgagcagg

SEQ ID NO: 28148 - RNA, 22 nt, synthetic construct
  source 1..22: mol_type = other RNA
ataaaaaaggtctatggccata

SEQ ID NO: 28149 - RNA, 22 nt, synthetic construct
  source 1..22: mol_type = other RNA
ataaacaatctgcatattggga

SEQ ID NO: 28150 - RNA, 22 nt, synthetic construct
  source 1..22: mol_type = other RNA
ataaggctggcagaataggctg

SEQ ID NO: 28151 - RNA, 22 nt, synthetic construct
  source 1..22: mol_type = other RNA
ataatcctggacttctccagta

SEQ ID NO: 28152 - RNA, 22 nt, synthetic construct
  source 1..22: mol_type = other RNA
atacacaactttcagcagctta

SEQ ID NO: 28153 - RNA, 22 nt, synthetic construct
  source 1..22: mol_type = other RNA
atacactcttaacacttcttac

SEQ ID NO: 28154 - RNA, 22 nt, synthetic construct
  source 1..22: mol_type = other RNA
atacatatacactcttaacact

SEQ ID NO: 28155 - RNA, 22 nt, synthetic construct
  source 1..22: mol_type = other RNA
atacattgtttagagctaccca

SEQ ID NO: 28156 - RNA, 22 nt, synthetic construct
  source 1..22: mol_type = other RNA
ataccaatccagccagaaagta

SEQ ID NO: 28157 - RNA, 22 nt, synthetic construct
  source 1..22: mol_type = other RNA
ataccatgtactaacaaatgtc

SEQ ID NO: 28158 - RNA, 22 nt, synthetic construct
  source 1..22: mol_type = other RNA
atacctgaagctgccacaaaag

SEQ ID NO: 28159 - RNA, 22 nt, synthetic construct
  source 1..22: mol_type = other RNA
ataccttcttgagatgttcgtt

SEQ ID NO: 28160 - RNA, 22 nt, synthetic construct
  source 1..22: mol_type = other RNA
atactaccctgaatgagtccca

SEQ ID NO: 28161 - RNA, 22 nt, synthetic construct
  source 1..22: mol_type = other RNA
atactgatgcacagcatggttt

SEQ ID NO: 28162 - RNA, 22 nt, synthetic construct
  source 1..22: mol_type = other RNA
ataggatgctaggacagcagga

SEQ ID NO: 28163 - RNA, 22 nt, synthetic construct
  source 1..22: mol_type = other RNA
ataggcctttgtttgtaagtcc

SEQ ID NO: 28164 - RNA, 22 nt, synthetic construct
  source 1..22: mol_type = other RNA
ataggctgctgttcctacccat

SEQ ID NO: 28165 - RNA, 22 nt, synthetic construct
  source 1..22: mol_type = other RNA
atataaaaaaggtctatggcca

SEQ ID NO: 28166 - RNA, 22 nt, synthetic construct
  source 1..22: mol_type = other RNA
atataaacaatctgcatattgg

SEQ ID NO: 28167 - RNA, 22 nt, synthetic construct
  source 1..22: mol_type = other RNA
atatacactcttaacacttctt

SEQ ID NO: 28168 - RNA, 22 nt, synthetic construct
  source 1..22: mol_type = other RNA
atatacctgaagctgccacaaa

SEQ ID NO: 28169 - RNA, 22 nt, synthetic construct
  source 1..22: mol_type = other RNA
atatcaaagcagctttatgata

SEQ ID NO: 28170 - RNA, 22 nt, synthetic construct
  source 1..22: mol_type = other RNA
atatcagatgggatgggactca

SEQ ID NO: 28171 - RNA, 22 nt, synthetic construct
  source 1..22: mol_type = other RNA
atatcataaagctgctttgata

SEQ ID NO: 28172 - RNA, 22 nt, synthetic construct
  source 1..22: mol_type = other RNA
atatgactactcatacacaact

SEQ ID NO: 28173 - RNA, 22 nt, synthetic construct
  source 1..22: mol_type = other RNA
atatgcagattgtttatatcag

SEQ ID NO: 28174 - RNA, 22 nt, synthetic construct
  source 1..22: mol_type = other RNA
atatgtatttgtgcaagtgctg

SEQ ID NO: 28175 - RNA, 22 nt, synthetic construct
  source 1..22: mol_type = other RNA
atattgggattgtcagggaatg

SEQ ID NO: 28176 - RNA, 22 nt, synthetic construct
  source 1..22: mol_type = other RNA
atatttagcactgaacgaacat

SEQ ID NO: 28177 - RNA, 22 nt, synthetic construct
  source 1..22: mol_type = other RNA
atcaaagcagctttatgatatg

SEQ ID NO: 28178 - RNA, 22 nt, synthetic construct
  source 1..22: mol_type = other RNA
atcagatgggatgggactcatt

SEQ ID NO: 28179 - RNA, 22 nt, synthetic construct
  source 1..22: mol_type = other RNA
atcagattagtggcacctgctg

SEQ ID NO: 28180 - RNA, 22 nt, synthetic construct
  source 1..22: mol_type = other RNA
atcagtatctcagcaggtgcca

SEQ ID NO: 28181 - RNA, 22 nt, synthetic construct
  source 1..22: mol_type = other RNA
atcataaagctgctttgatata

SEQ ID NO: 28182 - RNA, 22 nt, synthetic construct
  source 1..22: mol_type = other RNA
atccagccagaaagtactggag

SEQ ID NO: 28183 - RNA, 22 nt, synthetic construct
  source 1..22: mol_type = other RNA
atcccaatatgcagattgttta

SEQ ID NO: 28184 - RNA, 22 nt, synthetic construct
  source 1..22: mol_type = other RNA
atcccatctgatataaacaatc

SEQ ID NO: 28185 - RNA, 22 nt, synthetic construct
  source 1..22: mol_type = other RNA
atcctataatcctggacttctc

SEQ ID NO: 28186 - RNA, 22 nt, synthetic construct
  source 1..22: mol_type = other RNA
atcctggacttctccagtactt

SEQ ID NO: 28187 - RNA, 22 nt, synthetic construct
  source 1..22: mol_type = other RNA
atctcaagaaggtataggcctt

SEQ ID NO: 28188 - RNA, 22 nt, synthetic construct
  source 1..22: mol_type = other RNA
atctcagcaggtgccactaatc

SEQ ID NO: 28189 - RNA, 22 nt, synthetic construct
  source 1..22: mol_type = other RNA
atctgaggctagtaggaagggc

SEQ ID NO: 28190 - RNA, 22 nt, synthetic construct
  source 1..22: mol_type = other RNA
atctgatataaacaatctgcat

SEQ ID NO: 28191 - RNA, 22 nt, synthetic construct
  source 1..22: mol_type = other RNA
atctgatctttaagaacattcc

SEQ ID NO: 28192 - RNA, 22 nt, synthetic construct
  source 1..22: mol_type = other RNA
atctgcatattgggattgtcag

SEQ ID NO: 28193 - RNA, 22 nt, synthetic construct
  source 1..22: mol_type = other RNA
atctttaagaacattccctgac

SEQ ID NO: 28194 - RNA, 22 nt, synthetic construct
  source 1..22: mol_type = other RNA
atgaaaaagacagtggagaaaa

SEQ ID NO: 28195 - RNA, 22 nt, synthetic construct
  source 1..22: mol_type = other RNA
atgaatacattgtttagagcta

SEQ ID NO: 28196 - RNA, 22 nt, synthetic construct
  source 1..22: mol_type = other RNA
atgactactcatacacaacttt

SEQ ID NO: 28197 - RNA, 22 nt, synthetic construct
  source 1..22: mol_type = other RNA
atgagtagtcatatcataaagc

SEQ ID NO: 28198 - RNA, 22 nt, synthetic construct
  source 1..22: mol_type = other RNA
atgagtcccatcccatctgata

SEQ ID NO: 28199 - RNA, 22 nt, synthetic construct
  source 1..22: mol_type = other RNA
atgatatgactactcatacaca

SEQ ID NO: 28200 - RNA, 22 nt, synthetic construct
  source 1..22: mol_type = other RNA
atgcacagcatggtttctgaac

SEQ ID NO: 28201 - RNA, 22 nt, synthetic construct
  source 1..22: mol_type = other RNA
atgcagattgtttatatcagat

SEQ ID NO: 28202 - RNA, 22 nt, synthetic construct
  source 1..22: mol_type = other RNA
atgctaggacagcaggacttac

SEQ ID NO: 28203 - RNA, 22 nt, synthetic construct
  source 1..22: mol_type = other RNA
atgctgtgcatcagtatctcag

SEQ ID NO: 28204 - RNA, 22 nt, synthetic construct
  source 1..22: mol_type = other RNA
atggccatactaccctgaatga

SEQ ID NO: 28205 - RNA, 22 nt, synthetic construct
  source 1..22: mol_type = other RNA
atggccatagaccttttttata

SEQ ID NO: 28206 - RNA, 22 nt, synthetic construct
  source 1..22: mol_type = other RNA
atgggactcattcagggtagta

SEQ ID NO: 28207 - RNA, 22 nt, synthetic construct
  source 1..22: mol_type = other RNA
atgggatgggactcattcaggg

SEQ ID NO: 28208 - RNA, 22 nt, synthetic construct
  source 1..22: mol_type = other RNA
atgggtaggaacagcagcctat

SEQ ID NO: 28209 - RNA, 22 nt, synthetic construct
  source 1..22: mol_type = other RNA
atggttagaaataaggctggca

SEQ ID NO: 28210 - RNA, 22 nt, synthetic construct
  source 1..22: mol_type = other RNA
atggtttctgaaccagtagttt

SEQ ID NO: 28211 - RNA, 22 nt, synthetic construct
  source 1..22: mol_type = other RNA
atgtattcatgggtaggaacag

SEQ ID NO: 28212 - RNA, 22 nt, synthetic construct
  source 1..22: mol_type = other RNA
atgtatttgtgcaagtgctgct

SEQ ID NO: 28213 - RNA, 22 nt, synthetic construct
  source 1..22: mol_type = other RNA
atgttcgttcagtgctaaatat

SEQ ID NO: 28214 - RNA, 22 nt, synthetic construct
  source 1..22: mol_type = other RNA
atgttcttaaagatcagattag

SEQ ID NO: 28215 - RNA, 22 nt, synthetic construct
  source 1..22: mol_type = other RNA
attagtggcacctgctgagata

SEQ ID NO: 28216 - RNA, 22 nt, synthetic construct
  source 1..22: mol_type = other RNA
attataggatgctaggacagca

SEQ ID NO: 28217 - RNA, 22 nt, synthetic construct
  source 1..22: mol_type = other RNA
attcagggtagtatggccatag

SEQ ID NO: 28218 - RNA, 22 nt, synthetic construct
  source 1..22: mol_type = other RNA
attcatgggtaggaacagcagc

SEQ ID NO: 28219 - RNA, 22 nt, synthetic construct
  source 1..22: mol_type = other RNA
attccctgacaatcccaatatg

SEQ ID NO: 28220 - RNA, 22 nt, synthetic construct
  source 1..22: mol_type = other RNA
attctgccagccttatttctaa

SEQ ID NO: 28221 - RNA, 22 nt, synthetic construct
  source 1..22: mol_type = other RNA
attcttttgtaagctgctgaaa

SEQ ID NO: 28222 - RNA, 22 nt, synthetic construct
  source 1..22: mol_type = other RNA
attgggattgtcagggaatgtt

SEQ ID NO: 28223 - RNA, 22 nt, synthetic construct
  source 1..22: mol_type = other RNA
attggtatctgaggctagtagg

SEQ ID NO: 28224 - RNA, 22 nt, synthetic construct
  source 1..22: mol_type = other RNA
attgtcagggaatgttcttaaa

SEQ ID NO: 28225 - RNA, 22 nt, synthetic construct
  source 1..22: mol_type = other RNA
attgtttagagctacccagcag

SEQ ID NO: 28226 - RNA, 22 nt, synthetic construct
  source 1..22: mol_type = other RNA
attgtttatatcagatgggatg

SEQ ID NO: 28227 - RNA, 22 nt, synthetic construct
  source 1..22: mol_type = other RNA
atttagcactgaacgaacatct

SEQ ID NO: 28228 - RNA, 22 nt, synthetic construct
  source 1..22: mol_type = other RNA
atttgtgcaagtgctgctgctg

SEQ ID NO: 28229 - RNA, 22 nt, synthetic construct
  source 1..22: mol_type = other RNA
caaaagctagaggaagccagta

SEQ ID NO: 28230 - RNA, 22 nt, synthetic construct
  source 1..22: mol_type = other RNA
caaacaaaggcctataccttct

SEQ ID NO: 28231 - RNA, 22 nt, synthetic construct
  source 1..22: mol_type = other RNA
caaagcagctttatgatatgac

SEQ ID NO: 28232 - RNA, 22 nt, synthetic construct
  source 1..22: mol_type = other RNA
caaaggcctataccttcttgag

SEQ ID NO: 28233 - RNA, 22 nt, synthetic construct
  source 1..22: mol_type = other RNA
caaatacatatacactcttaac

SEQ ID NO: 28234 - RNA, 22 nt, synthetic construct
  source 1..22: mol_type = other RNA
caaatgtctaaaatggttagaa

SEQ ID NO: 28235 - RNA, 22 nt, synthetic construct
  source 1..22: mol_type = other RNA
caactgcagggaaactactggt

SEQ ID NO: 28236 - RNA, 22 nt, synthetic construct
  source 1..22: mol_type = other RNA
caactttcagcagcttacaaaa

SEQ ID NO: 28237 - RNA, 22 nt, synthetic construct
  source 1..22: mol_type = other RNA
caagaaggtataggcctttgtt

SEQ ID NO: 28238 - RNA, 22 nt, synthetic construct
  source 1..22: mol_type = other RNA
caagcccttcctactagcctca

SEQ ID NO: 28239 - RNA, 22 nt, synthetic construct
  source 1..22: mol_type = other RNA
caagtgctgctgctgctccctg

SEQ ID NO: 28240 - RNA, 22 nt, synthetic construct
  source 1..22: mol_type = other RNA
caatatgcagattgtttatatc

SEQ ID NO: 28241 - RNA, 22 nt, synthetic construct
  source 1..22: mol_type = other RNA
caatccagccagaaagtactgg

SEQ ID NO: 28242 - RNA, 22 nt, synthetic construct
  source 1..22: mol_type = other RNA
caatcccaatatgcagattgtt

SEQ ID NO: 28243 - RNA, 22 nt, synthetic construct
  source 1..22: mol_type = other RNA
caatctgcatattgggattgtc

SEQ ID NO: 28244 - RNA, 22 nt, synthetic construct
  source 1..22: mol_type = other RNA
caatgtattcatgggtaggaac

SEQ ID NO: 28245 - RNA, 22 nt, synthetic construct
  source 1..22: mol_type = other RNA
cacaaaagctagaggaagccag

SEQ ID NO: 28246 - RNA, 22 nt, synthetic construct
  source 1..22: mol_type = other RNA
cacaaatacatatacactctta

SEQ ID NO: 28247 - RNA, 22 nt, synthetic construct
  source 1..22: mol_type = other RNA
cacaactttcagcagcttacaa

SEQ ID NO: 28248 - RNA, 22 nt, synthetic construct
  source 1..22: mol_type = other RNA
cacagcatggtttctgaaccag

SEQ ID NO: 28249 - RNA, 22 nt, synthetic construct
  source 1..22: mol_type = other RNA
cacctgctgagatactgatgca

SEQ ID NO: 28250 - RNA, 22 nt, synthetic construct
  source 1..22: mol_type = other RNA
cactaatctgatctttaagaac

SEQ ID NO: 28251 - RNA, 22 nt, synthetic construct
  source 1..22: mol_type = other RNA
cactcttaacacttcttaccta

SEQ ID NO: 28252 - RNA, 22 nt, synthetic construct
  source 1..22: mol_type = other RNA
cactgaacgaacatctcaagaa

SEQ ID NO: 28253 - RNA, 22 nt, synthetic construct
  source 1..22: mol_type = other RNA
cacttcttacctactggcttcc

SEQ ID NO: 28254 - RNA, 22 nt, synthetic construct
  source 1..22: mol_type = other RNA
cacttgcacaaatacatataca

SEQ ID NO: 28255 - RNA, 22 nt, synthetic construct
  source 1..22: mol_type = other RNA
cagaaaccatgctgtgcatcag

SEQ ID NO: 28256 - RNA, 22 nt, synthetic construct
  source 1..22: mol_type = other RNA
cagaaagtactggagaagtcca

SEQ ID NO: 28257 - RNA, 22 nt, synthetic construct
  source 1..22: mol_type = other RNA
cagaataggctgctgttcctac

SEQ ID NO: 28258 - RNA, 22 nt, synthetic construct
  source 1..22: mol_type = other RNA
cagataccaatccagccagaaa

SEQ ID NO: 28259 - RNA, 22 nt, synthetic construct
  source 1..22: mol_type = other RNA
cagatgggatgggactcattca

SEQ ID NO: 28260 - RNA, 22 nt, synthetic construct
  source 1..22: mol_type = other RNA
cagattagtggcacctgctgag

SEQ ID NO: 28261 - RNA, 22 nt, synthetic construct
  source 1..22: mol_type = other RNA
cagattgtttatatcagatggg

SEQ ID NO: 28262 - RNA, 22 nt, synthetic construct
  source 1..22: mol_type = other RNA
cagcacttgcacaaatacatat

SEQ ID NO: 28263 - RNA, 22 nt, synthetic construct
  source 1..22: mol_type = other RNA
cagcagcacttgcacaaataca

SEQ ID NO: 28264 - RNA, 22 nt, synthetic construct
  source 1..22: mol_type = other RNA
cagcagcagcacttgcacaaat

SEQ ID NO: 28265 - RNA, 22 nt, synthetic construct
  source 1..22: mol_type = other RNA
cagcagcctattctgccagcct

SEQ ID NO: 28266 - RNA, 22 nt, synthetic construct
  source 1..22: mol_type = other RNA
cagcagcttacaaaagaatgta

SEQ ID NO: 28267 - RNA, 22 nt, synthetic construct
  source 1..22: mol_type = other RNA
cagcaggaacaagcccttccta

SEQ ID NO: 28268 - RNA, 22 nt, synthetic construct
  source 1..22: mol_type = other RNA
cagcaggacttacaaacaaagg

SEQ ID NO: 28269 - RNA, 22 nt, synthetic construct
  source 1..22: mol_type = other RNA
cagcaggtgccactaatctgat

SEQ ID NO: 28270 - RNA, 22 nt, synthetic construct
  source 1..22: mol_type = other RNA
cagcatggtttctgaaccagta

SEQ ID NO: 28271 - RNA, 22 nt, synthetic construct
  source 1..22: mol_type = other RNA
cagccagaaagtactggagaag

SEQ ID NO: 28272 - RNA, 22 nt, synthetic construct
  source 1..22: mol_type = other RNA
cagcctattctgccagccttat

SEQ ID NO: 28273 - RNA, 22 nt, synthetic construct
  source 1..22: mol_type = other RNA
cagccttatttctaaccatttt

SEQ ID NO: 28274 - RNA, 22 nt, synthetic construct
  source 1..22: mol_type = other RNA
cagcttcaggtatatttagcac

SEQ ID NO: 28275 - RNA, 22 nt, synthetic construct
  source 1..22: mol_type = other RNA
cagctttatgatatgactactc

SEQ ID NO: 28276 - RNA, 22 nt, synthetic construct
  source 1..22: mol_type = other RNA
caggaacaagcccttcctacta

SEQ ID NO: 28277 - RNA, 22 nt, synthetic construct
  source 1..22: mol_type = other RNA
caggacttacaaacaaaggcct

SEQ ID NO: 28278 - RNA, 22 nt, synthetic construct
  source 1..22: mol_type = other RNA
caggattataggatgctaggac

SEQ ID NO: 28279 - RNA, 22 nt, synthetic construct
  source 1..22: mol_type = other RNA
cagggaaactactggttcagaa

SEQ ID NO: 28280 - RNA, 22 nt, synthetic construct
  source 1..22: mol_type = other RNA
cagggaatgttcttaaagatca

SEQ ID NO: 28281 - RNA, 22 nt, synthetic construct
  source 1..22: mol_type = other RNA
cagggagcagcagcagcacttg

SEQ ID NO: 28282 - RNA, 22 nt, synthetic construct
  source 1..22: mol_type = other RNA
cagggtagtatggccatagacc

SEQ ID NO: 28283 - RNA, 22 nt, synthetic construct
  source 1..22: mol_type = other RNA
caggtatatttagcactgaacg

SEQ ID NO: 28284 - RNA, 22 nt, synthetic construct
  source 1..22: mol_type = other RNA
caggtgccactaatctgatctt

SEQ ID NO: 28285 - RNA, 22 nt, synthetic construct
  source 1..22: mol_type = other RNA
cagtactttctggctggattgg

SEQ ID NO: 28286 - RNA, 22 nt, synthetic construct
  source 1..22: mol_type = other RNA
cagtaggtaagaagtgttaaga

SEQ ID NO: 28287 - RNA, 22 nt, synthetic construct
  source 1..22: mol_type = other RNA
cagtagtttccctgcagttgag

SEQ ID NO: 28288 - RNA, 22 nt, synthetic construct
  source 1..22: mol_type = other RNA
cagtatctcagcaggtgccact

SEQ ID NO: 28289 - RNA, 22 nt, synthetic construct
  source 1..22: mol_type = other RNA
cagtgctaaatatacctgaagc

SEQ ID NO: 28290 - RNA, 22 nt, synthetic construct
  source 1..22: mol_type = other RNA
cagttgagcagggagcagcagc

SEQ ID NO: 28291 - RNA, 22 nt, synthetic construct
  source 1..22: mol_type = other RNA
cataaagctgctttgatataaa

SEQ ID NO: 28292 - RNA, 22 nt, synthetic construct
  source 1..22: mol_type = other RNA
catacacaactttcagcagctt

SEQ ID NO: 28293 - RNA, 22 nt, synthetic construct
  source 1..22: mol_type = other RNA
catactaccctgaatgagtccc

SEQ ID NO: 28294 - RNA, 22 nt, synthetic construct
  source 1..22: mol_type = other RNA
catatacactcttaacacttct

SEQ ID NO: 28295 - RNA, 22 nt, synthetic construct
  source 1..22: mol_type = other RNA
catatcataaagctgctttgat

SEQ ID NO: 28296 - RNA, 22 nt, synthetic construct
  source 1..22: mol_type = other RNA
catattgggattgtcagggaat

SEQ ID NO: 28297 - RNA, 22 nt, synthetic construct
  source 1..22: mol_type = other RNA
catcagtatctcagcaggtgcc

SEQ ID NO: 28298 - RNA, 22 nt, synthetic construct
  source 1..22: mol_type = other RNA
catcccatctgatataaacaat

SEQ ID NO: 28299 - RNA, 22 nt, synthetic construct
  source 1..22: mol_type = other RNA
catcctataatcctggacttct

SEQ ID NO: 28300 - RNA, 22 nt, synthetic construct
  source 1..22: mol_type = other RNA
catctcaagaaggtataggcct

SEQ ID NO: 28301 - RNA, 22 nt, synthetic construct
  source 1..22: mol_type = other RNA
catctgatataaacaatctgca

SEQ ID NO: 28302 - RNA, 22 nt, synthetic construct
  source 1..22: mol_type = other RNA
catgaatacattgtttagagct

SEQ ID NO: 28303 - RNA, 22 nt, synthetic construct
  source 1..22: mol_type = other RNA
catgctgtgcatcagtatctca

SEQ ID NO: 28304 - RNA, 22 nt, synthetic construct
  source 1..22: mol_type = other RNA
catgggtaggaacagcagccta

SEQ ID NO: 28305 - RNA, 22 nt, synthetic construct
  source 1..22: mol_type = other RNA
catggtttctgaaccagtagtt

SEQ ID NO: 28306 - RNA, 22 nt, synthetic construct
  source 1..22: mol_type = other RNA
catgtactaacaaatgtctaaa

SEQ ID NO: 28307 - RNA, 22 nt, synthetic construct
  source 1..22: mol_type = other RNA
cattcagggtagtatggccata

SEQ ID NO: 28308 - RNA, 22 nt, synthetic construct
  source 1..22: mol_type = other RNA
cattccctgacaatcccaatat

SEQ ID NO: 28309 - RNA, 22 nt, synthetic construct
  source 1..22: mol_type = other RNA
cattcttttgtaagctgctgaa

SEQ ID NO: 28310 - RNA, 22 nt, synthetic construct
  source 1..22: mol_type = other RNA
cattgtttagagctacccagca

SEQ ID NO: 28311 - RNA, 22 nt, synthetic construct
  source 1..22: mol_type = other RNA
catttgttagtacatggtattt

SEQ ID NO: 28312 - RNA, 22 nt, synthetic construct
  source 1..22: mol_type = other RNA
cattttagacatttgttagtac

SEQ ID NO: 28313 - RNA, 22 nt, synthetic construct
  source 1..22: mol_type = other RNA
ccaatatgcagattgtttatat

SEQ ID NO: 28314 - RNA, 22 nt, synthetic construct
  source 1..22: mol_type = other RNA
ccaatccagccagaaagtactg

SEQ ID NO: 28315 - RNA, 22 nt, synthetic construct
  source 1..22: mol_type = other RNA
ccacaaaagctagaggaagcca

SEQ ID NO: 28316 - RNA, 22 nt, synthetic construct
  source 1..22: mol_type = other RNA
ccactaatctgatctttaagaa

SEQ ID NO: 28317 - RNA, 22 nt, synthetic construct
  source 1..22: mol_type = other RNA
ccagaaagtactggagaagtcc

SEQ ID NO: 28318 - RNA, 22 nt, synthetic construct
  source 1..22: mol_type = other RNA
ccagcaggaacaagcccttcct

SEQ ID NO: 28319 - RNA, 22 nt, synthetic construct
  source 1..22: mol_type = other RNA
ccagccagaaagtactggagaa

SEQ ID NO: 28320 - RNA, 22 nt, synthetic construct
  source 1..22: mol_type = other RNA
ccagccttatttctaaccattt

SEQ ID NO: 28321 - RNA, 22 nt, synthetic construct
  source 1..22: mol_type = other RNA
ccaggattataggatgctagga

SEQ ID NO: 28322 - RNA, 22 nt, synthetic construct
  source 1..22: mol_type = other RNA
ccagtactttctggctggattg

SEQ ID NO: 28323 - RNA, 22 nt, synthetic construct
  source 1..22: mol_type = other RNA
ccagtaggtaagaagtgttaag

SEQ ID NO: 28324 - RNA, 22 nt, synthetic construct
  source 1..22: mol_type = other RNA
ccagtagtttccctgcagttga

SEQ ID NO: 28325 - RNA, 22 nt, synthetic construct
  source 1..22: mol_type = other RNA
ccatactaccctgaatgagtcc

SEQ ID NO: 28326 - RNA, 22 nt, synthetic construct
  source 1..22: mol_type = other RNA
ccatagaccttttttatatcaa

SEQ ID NO: 28327 - RNA, 22 nt, synthetic construct
  source 1..22: mol_type = other RNA
ccatcccatctgatataaacaa

SEQ ID NO: 28328 - RNA, 22 nt, synthetic construct
  source 1..22: mol_type = other RNA
ccatctgatataaacaatctgc

SEQ ID NO: 28329 - RNA, 22 nt, synthetic construct
  source 1..22: mol_type = other RNA
ccatgaatacattgtttagagc

SEQ ID NO: 28330 - RNA, 22 nt, synthetic construct
  source 1..22: mol_type = other RNA
ccatgctgtgcatcagtatctc

SEQ ID NO: 28331 - RNA, 22 nt, synthetic construct
  source 1..22: mol_type = other RNA
ccatgtactaacaaatgtctaa

SEQ ID NO: 28332 - RNA, 22 nt, synthetic construct
  source 1..22: mol_type = other RNA
ccattttagacatttgttagta

SEQ ID NO: 28333 - RNA, 22 nt, synthetic construct
  source 1..22: mol_type = other RNA
cccaatatgcagattgtttata

SEQ ID NO: 28334 - RNA, 22 nt, synthetic construct
  source 1..22: mol_type = other RNA
cccagcaggaacaagcccttcc

SEQ ID NO: 28335 - RNA, 22 nt, synthetic construct
  source 1..22: mol_type = other RNA
cccatcccatctgatataaaca

SEQ ID NO: 28336 - RNA, 22 nt, synthetic construct
  source 1..22: mol_type = other RNA
cccatctgatataaacaatctg

SEQ ID NO: 28337 - RNA, 22 nt, synthetic construct
  source 1..22: mol_type = other RNA
cccatgaatacattgtttagag

SEQ ID NO: 28338 - RNA, 22 nt, synthetic construct
  source 1..22: mol_type = other RNA
ccctgaatgagtcccatcccat

SEQ ID NO: 28339 - RNA, 22 nt, synthetic construct
  source 1..22: mol_type = other RNA
ccctgacaatcccaatatgcag

SEQ ID NO: 28340 - RNA, 22 nt, synthetic construct
  source 1..22: mol_type = other RNA
ccctgcagttgagcagggagca

SEQ ID NO: 28341 - RNA, 22 nt, synthetic construct
  source 1..22: mol_type = other RNA
ccctgctcaactgcagggaaac

SEQ ID NO: 28342 - RNA, 22 nt, synthetic construct
  source 1..22: mol_type = other RNA
cccttcctactagcctcagata

SEQ ID NO: 28343 - RNA, 22 nt, synthetic construct
  source 1..22: mol_type = other RNA
cctacccatgaatacattgttt

SEQ ID NO: 28344 - RNA, 22 nt, synthetic construct
  source 1..22: mol_type = other RNA
cctactagcctcagataccaat

SEQ ID NO: 28345 - RNA, 22 nt, synthetic construct
  source 1..22: mol_type = other RNA
cctactggcttcctctagcttt

SEQ ID NO: 28346 - RNA, 22 nt, synthetic construct
  source 1..22: mol_type = other RNA
cctagcatcctataatcctgga

SEQ ID NO: 28347 - RNA, 22 nt, synthetic construct
  source 1..22: mol_type = other RNA
cctataatcctggacttctcca

SEQ ID NO: 28348 - RNA, 22 nt, synthetic construct
  source 1..22: mol_type = other RNA
cctataccttcttgagatgttc

SEQ ID NO: 28349 - RNA, 22 nt, synthetic construct
  source 1..22: mol_type = other RNA
cctattctgccagccttatttc

SEQ ID NO: 28350 - RNA, 22 nt, synthetic construct
  source 1..22: mol_type = other RNA
cctcagataccaatccagccag

SEQ ID NO: 28351 - RNA, 22 nt, synthetic construct
  source 1..22: mol_type = other RNA
cctctagcttttgtggcagctt

SEQ ID NO: 28352 - RNA, 22 nt, synthetic construct
  source 1..22: mol_type = other RNA
cctgaagctgccacaaaagcta

SEQ ID NO: 28353 - RNA, 22 nt, synthetic construct
  source 1..22: mol_type = other RNA
cctgaatgagtcccatcccatc

SEQ ID NO: 28354 - RNA, 22 nt, synthetic construct
  source 1..22: mol_type = other RNA
cctgacaatcccaatatgcaga

SEQ ID NO: 28355 - RNA, 22 nt, synthetic construct
  source 1..22: mol_type = other RNA
cctgcagttgagcagggagcag

SEQ ID NO: 28356 - RNA, 22 nt, synthetic construct
  source 1..22: mol_type = other RNA
cctgctcaactgcagggaaact

SEQ ID NO: 28357 - RNA, 22 nt, synthetic construct
  source 1..22: mol_type = other RNA
cctgctgagatactgatgcaca

SEQ ID NO: 28358 - RNA, 22 nt, synthetic construct
  source 1..22: mol_type = other RNA
cctgctgggtagctctaaacaa

SEQ ID NO: 28359 - RNA, 22 nt, synthetic construct
  source 1..22: mol_type = other RNA
cctgctgtcctagcatcctata

SEQ ID NO: 28360 - RNA, 22 nt, synthetic construct
  source 1..22: mol_type = other RNA
cctggacttctccagtactttc

SEQ ID NO: 28361 - RNA, 22 nt, synthetic construct
  source 1..22: mol_type = other RNA
ccttatttctaaccattttaga

SEQ ID NO: 28362 - RNA, 22 nt, synthetic construct
  source 1..22: mol_type = other RNA
ccttcctactagcctcagatac

SEQ ID NO: 28363 - RNA, 22 nt, synthetic construct
  source 1..22: mol_type = other RNA
ccttcttgagatgttcgttcag

SEQ ID NO: 28364 - RNA, 22 nt, synthetic construct
  source 1..22: mol_type = other RNA
cctttgtttgtaagtcctgctg

SEQ ID NO: 28365 - RNA, 22 nt, synthetic construct
  source 1..22: mol_type = other RNA
ccttttttatatcaaagcagct

SEQ ID NO: 28366 - RNA, 22 nt, synthetic construct
  source 1..22: mol_type = other RNA
cgaacatctcaagaaggtatag

SEQ ID NO: 28367 - RNA, 22 nt, synthetic construct
  source 1..22: mol_type = other RNA
cgttcagtgctaaatatacctg

SEQ ID NO: 28368 - RNA, 22 nt, synthetic construct
  source 1..22: mol_type = other RNA
ctaaaatggttagaaataaggc

SEQ ID NO: 28369 - RNA, 22 nt, synthetic construct
  source 1..22: mol_type = other RNA
ctaaacaatgtattcatgggta

SEQ ID NO: 28370 - RNA, 22 nt, synthetic construct
  source 1..22: mol_type = other RNA
ctaaatatacctgaagctgcca

SEQ ID NO: 28371 - RNA, 22 nt, synthetic construct
  source 1..22: mol_type = other RNA
ctaacaaatgtctaaaatggtt

SEQ ID NO: 28372 - RNA, 22 nt, synthetic construct
  source 1..22: mol_type = other RNA
ctaaccattttagacatttgtt

SEQ ID NO: 28373 - RNA, 22 nt, synthetic construct
  source 1..22: mol_type = other RNA
ctaatctgatctttaagaacat

SEQ ID NO: 28374 - RNA, 22 nt, synthetic construct
  source 1..22: mol_type = other RNA
ctacccagcaggaacaagccct

SEQ ID NO: 28375 - RNA, 22 nt, synthetic construct
  source 1..22: mol_type = other RNA
ctacccatgaatacattgttta

SEQ ID NO: 28376 - RNA, 22 nt, synthetic construct
  source 1..22: mol_type = other RNA
ctaccctgaatgagtcccatcc

SEQ ID NO: 28377 - RNA, 22 nt, synthetic construct
  source 1..22: mol_type = other RNA
ctactagcctcagataccaatc

SEQ ID NO: 28378 - RNA, 22 nt, synthetic construct
  source 1..22: mol_type = other RNA
ctactcatacacaactttcagc

SEQ ID NO: 28379 - RNA, 22 nt, synthetic construct
  source 1..22: mol_type = other RNA
ctactggcttcctctagctttt

SEQ ID NO: 28380 - RNA, 22 nt, synthetic construct
  source 1..22: mol_type = other RNA
ctactggttcagaaaccatgct

SEQ ID NO: 28381 - RNA, 22 nt, synthetic construct
  source 1..22: mol_type = other RNA
ctagaggaagccagtaggtaag

SEQ ID NO: 28382 - RNA, 22 nt, synthetic construct
  source 1..22: mol_type = other RNA
ctagcatcctataatcctggac

SEQ ID NO: 28383 - RNA, 22 nt, synthetic construct
  source 1..22: mol_type = other RNA
ctagcctcagataccaatccag

SEQ ID NO: 28384 - RNA, 22 nt, synthetic construct
  source 1..22: mol_type = other RNA
ctagcttttgtggcagcttcag

SEQ ID NO: 28385 - RNA, 22 nt, synthetic construct
  source 1..22: mol_type = other RNA
ctaggacagcaggacttacaaa

SEQ ID NO: 28386 - RNA, 22 nt, synthetic construct
  source 1..22: mol_type = other RNA
ctagtaggaagggcttgttcct

SEQ ID NO: 28387 - RNA, 22 nt, synthetic construct
  source 1..22: mol_type = other RNA
ctataatcctggacttctccag

SEQ ID NO: 28388 - RNA, 22 nt, synthetic construct
  source 1..22: mol_type = other RNA
ctataccttcttgagatgttcg

SEQ ID NO: 28389 - RNA, 22 nt, synthetic construct
  source 1..22: mol_type = other RNA
ctatgaaaaagacagtggagaa

SEQ ID NO: 28390 - RNA, 22 nt, synthetic construct
  source 1..22: mol_type = other RNA
ctatggccatactaccctgaat

SEQ ID NO: 28391 - RNA, 22 nt, synthetic construct
  source 1..22: mol_type = other RNA
ctattctgccagccttatttct

SEQ ID NO: 28392 - RNA, 22 nt, synthetic construct
  source 1..22: mol_type = other RNA
ctcaactgcagggaaactactg

SEQ ID NO: 28393 - RNA, 22 nt, synthetic construct
  source 1..22: mol_type = other RNA
ctcaagaaggtataggcctttg

SEQ ID NO: 28394 - RNA, 22 nt, synthetic construct
  source 1..22: mol_type = other RNA
ctcagataccaatccagccaga

SEQ ID NO: 28395 - RNA, 22 nt, synthetic construct
  source 1..22: mol_type = other RNA
ctcagcaggtgccactaatctg

SEQ ID NO: 28396 - RNA, 22 nt, synthetic construct
  source 1..22: mol_type = other RNA
ctcatacacaactttcagcagc

SEQ ID NO: 28397 - RNA, 22 nt, synthetic construct
  source 1..22: mol_type = other RNA
ctcattcagggtagtatggcca

SEQ ID NO: 28398 - RNA, 22 nt, synthetic construct
  source 1..22: mol_type = other RNA
ctccagtactttctggctggat

SEQ ID NO: 28399 - RNA, 22 nt, synthetic construct
  source 1..22: mol_type = other RNA
ctccctgctcaactgcagggaa

SEQ ID NO: 28400 - RNA, 22 nt, synthetic construct
  source 1..22: mol_type = other RNA
ctctaaacaatgtattcatggg

SEQ ID NO: 28401 - RNA, 22 nt, synthetic construct
  source 1..22: mol_type = other RNA
ctctagcttttgtggcagcttc

SEQ ID NO: 28402 - RNA, 22 nt, synthetic construct
  source 1..22: mol_type = other RNA
ctcttaacacttcttacctact

SEQ ID NO: 28403 - RNA, 22 nt, synthetic construct
  source 1..22: mol_type = other RNA
ctgaaagttgtgtatgagtagt

SEQ ID NO: 28404 - RNA, 22 nt, synthetic construct
  source 1..22: mol_type = other RNA
ctgaaccagtagtttccctgca

SEQ ID NO: 28405 - RNA, 22 nt, synthetic construct
  source 1..22: mol_type = other RNA
ctgaacgaacatctcaagaagg

SEQ ID NO: 28406 - RNA, 22 nt, synthetic construct
  source 1..22: mol_type = other RNA
ctgaagctgccacaaaagctag

SEQ ID NO: 28407 - RNA, 22 nt, synthetic construct
  source 1..22: mol_type = other RNA
ctgaatgagtcccatcccatct

SEQ ID NO: 28408 - RNA, 22 nt, synthetic construct
  source 1..22: mol_type = other RNA
ctgacaatcccaatatgcagat

SEQ ID NO: 28409 - RNA, 22 nt, synthetic construct
  source 1..22: mol_type = other RNA
ctgagatactgatgcacagcat

SEQ ID NO: 28410 - RNA, 22 nt, synthetic construct
  source 1..22: mol_type = other RNA
ctgaggctagtaggaagggctt

SEQ ID NO: 28411 - RNA, 22 nt, synthetic construct
  source 1..22: mol_type = other RNA
ctgatataaacaatctgcatat

SEQ ID NO: 28412 - RNA, 22 nt, synthetic construct
  source 1..22: mol_type = other RNA
ctgatctttaagaacattccct

SEQ ID NO: 28413 - RNA, 22 nt, synthetic construct
  source 1..22: mol_type = other RNA
ctgatgcacagcatggtttctg

SEQ ID NO: 28414 - RNA, 22 nt, synthetic construct
  source 1..22: mol_type = other RNA
ctgcagggaaactactggttca

SEQ ID NO: 28415 - RNA, 22 nt, synthetic construct
  source 1..22: mol_type = other RNA
ctgcagttgagcagggagcagc

SEQ ID NO: 28416 - RNA, 22 nt, synthetic construct
  source 1..22: mol_type = other RNA
ctgcatattgggattgtcaggg

SEQ ID NO: 28417 - RNA, 22 nt, synthetic construct
  source 1..22: mol_type = other RNA
ctgccacaaaagctagaggaag

SEQ ID NO: 28418 - RNA, 22 nt, synthetic construct
  source 1..22: mol_type = other RNA
ctgccagccttatttctaacca

SEQ ID NO: 28419 - RNA, 22 nt, synthetic construct
  source 1..22: mol_type = other RNA
ctgctcaactgcagggaaacta

SEQ ID NO: 28420 - RNA, 22 nt, synthetic construct
  source 1..22: mol_type = other RNA
ctgctccctgctcaactgcagg

SEQ ID NO: 28421 - RNA, 22 nt, synthetic construct
  source 1..22: mol_type = other RNA
ctgctgaaagttgtgtatgagt

SEQ ID NO: 28422 - RNA, 22 nt, synthetic construct
  source 1..22: mol_type = other RNA
ctgctgagatactgatgcacag

SEQ ID NO: 28423 - RNA, 22 nt, synthetic construct
  source 1..22: mol_type = other RNA
ctgctgctccctgctcaactgc

SEQ ID NO: 28424 - RNA, 22 nt, synthetic construct
  source 1..22: mol_type = other RNA
ctgctgctgctccctgctcaac

SEQ ID NO: 28425 - RNA, 22 nt, synthetic construct
  source 1..22: mol_type = other RNA
ctgctgggtagctctaaacaat

SEQ ID NO: 28426 - RNA, 22 nt, synthetic construct
  source 1..22: mol_type = other RNA
ctgctgtcctagcatcctataa

SEQ ID NO: 28427 - RNA, 22 nt, synthetic construct
  source 1..22: mol_type = other RNA
ctgctgttcctacccatgaata

SEQ ID NO: 28428 - RNA, 22 nt, synthetic construct
  source 1..22: mol_type = other RNA
ctgctttgatataaaaaaggtc

SEQ ID NO: 28429 - RNA, 22 nt, synthetic construct
  source 1..22: mol_type = other RNA
ctggacttctccagtactttct

SEQ ID NO: 28430 - RNA, 22 nt, synthetic construct
  source 1..22: mol_type = other RNA
ctggagaagtccaggattatag

SEQ ID NO: 28431 - RNA, 22 nt, synthetic construct
  source 1..22: mol_type = other RNA
ctggattggtatctgaggctag

SEQ ID NO: 28432 - RNA, 22 nt, synthetic construct
  source 1..22: mol_type = other RNA
ctggcagaataggctgctgttc

SEQ ID NO: 28433 - RNA, 22 nt, synthetic construct
  source 1..22: mol_type = other RNA
ctggctggattggtatctgagg

SEQ ID NO: 28434 - RNA, 22 nt, synthetic construct
  source 1..22: mol_type = other RNA
ctggcttcctctagcttttgtg

SEQ ID NO: 28435 - RNA, 22 nt, synthetic construct
  source 1..22: mol_type = other RNA
ctgggtagctctaaacaatgta

SEQ ID NO: 28436 - RNA, 22 nt, synthetic construct
  source 1..22: mol_type = other RNA
ctggttcagaaaccatgctgtg

SEQ ID NO: 28437 - RNA, 22 nt, synthetic construct
  source 1..22: mol_type = other RNA
ctgtcctagcatcctataatcc

SEQ ID NO: 28438 - RNA, 22 nt, synthetic construct
  source 1..22: mol_type = other RNA
ctgtgcatcagtatctcagcag

SEQ ID NO: 28439 - RNA, 22 nt, synthetic construct
  source 1..22: mol_type = other RNA
ctgttcctacccatgaatacat

SEQ ID NO: 28440 - RNA, 22 nt, synthetic construct
  source 1..22: mol_type = other RNA
cttaaagatcagattagtggca

SEQ ID NO: 28441 - RNA, 22 nt, synthetic construct
  source 1..22: mol_type = other RNA
cttaacacttcttacctactgg

SEQ ID NO: 28442 - RNA, 22 nt, synthetic construct
  source 1..22: mol_type = other RNA
cttacaaacaaaggcctatacc

SEQ ID NO: 28443 - RNA, 22 nt, synthetic construct
  source 1..22: mol_type = other RNA
cttacattcttttgtaagctgc

SEQ ID NO: 28444 - RNA, 22 nt, synthetic construct
  source 1..22: mol_type = other RNA
cttacctactggcttcctctag

SEQ ID NO: 28445 - RNA, 22 nt, synthetic construct
  source 1..22: mol_type = other RNA
cttatttctaaccattttagac

SEQ ID NO: 28446 - RNA, 22 nt, synthetic construct
  source 1..22: mol_type = other RNA
cttcaggtatatttagcactga

SEQ ID NO: 28447 - RNA, 22 nt, synthetic construct
  source 1..22: mol_type = other RNA
cttcctactagcctcagatacc

SEQ ID NO: 28448 - RNA, 22 nt, synthetic construct
  source 1..22: mol_type = other RNA
cttcctctagcttttgtggcag

SEQ ID NO: 28449 - RNA, 22 nt, synthetic construct
  source 1..22: mol_type = other RNA
cttctccagtactttctggctg

SEQ ID NO: 28450 - RNA, 22 nt, synthetic construct
  source 1..22: mol_type = other RNA
cttcttacctactggcttcctc

SEQ ID NO: 28451 - RNA, 22 nt, synthetic construct
  source 1..22: mol_type = other RNA
cttcttgagatgttcgttcagt

SEQ ID NO: 28452 - RNA, 22 nt, synthetic construct
  source 1..22: mol_type = other RNA
cttgagatgttcgttcagtgct

SEQ ID NO: 28453 - RNA, 22 nt, synthetic construct
  source 1..22: mol_type = other RNA
cttgcacaaatacatatacact

SEQ ID NO: 28454 - RNA, 22 nt, synthetic construct
  source 1..22: mol_type = other RNA
cttgttcctgctgggtagctct

SEQ ID NO: 28455 - RNA, 22 nt, synthetic construct
  source 1..22: mol_type = other RNA
ctttaagaacattccctgacaa

SEQ ID NO: 28456 - RNA, 22 nt, synthetic construct
  source 1..22: mol_type = other RNA
ctttatgatatgactactcata

SEQ ID NO: 28457 - RNA, 22 nt, synthetic construct
  source 1..22: mol_type = other RNA
ctttcagcagcttacaaaagaa

SEQ ID NO: 28458 - RNA, 22 nt, synthetic construct
  source 1..22: mol_type = other RNA
ctttctggctggattggtatct

SEQ ID NO: 28459 - RNA, 22 nt, synthetic construct
  source 1..22: mol_type = other RNA
ctttgtttgtaagtcctgctgt

SEQ ID NO: 28460 - RNA, 22 nt, synthetic construct
  source 1..22: mol_type = other RNA
cttttgtaagctgctgaaagtt

SEQ ID NO: 28461 - RNA, 22 nt, synthetic construct
  source 1..22: mol_type = other RNA
cttttgtggcagcttcaggtat

SEQ ID NO: 28462 - RNA, 22 nt, synthetic construct
  source 1..22: mol_type = other RNA
cttttttatatcaaagcagctt

SEQ ID NO: 28463 - RNA, 22 nt, synthetic construct
  source 1..22: mol_type = other RNA
gaaaaagacagtggagaaaaaa

SEQ ID NO: 28464 - RNA, 22 nt, synthetic construct
  source 1..22: mol_type = other RNA
gaaaccatgctgtgcatcagta

SEQ ID NO: 28465 - RNA, 22 nt, synthetic construct
  source 1..22: mol_type = other RNA
gaaactactggttcagaaacca

SEQ ID NO: 28466 - RNA, 22 nt, synthetic construct
  source 1..22: mol_type = other RNA
gaaagtactggagaagtccagg

SEQ ID NO: 28467 - RNA, 22 nt, synthetic construct
  source 1..22: mol_type = other RNA
gaaagttgtgtatgagtagtca

SEQ ID NO: 28468 - RNA, 22 nt, synthetic construct
  source 1..22: mol_type = other RNA
gaaataaggctggcagaatagg

SEQ ID NO: 28469 - RNA, 22 nt, synthetic construct
  source 1..22: mol_type = other RNA
gaacaagcccttcctactagcc

SEQ ID NO: 28470 - RNA, 22 nt, synthetic construct
  source 1..22: mol_type = other RNA
gaacagcagcctattctgccag

SEQ ID NO: 28471 - RNA, 22 nt, synthetic construct
  source 1..22: mol_type = other RNA
gaacatctcaagaaggtatagg

SEQ ID NO: 28472 - RNA, 22 nt, synthetic construct
  source 1..22: mol_type = other RNA
gaacattccctgacaatcccaa

SEQ ID NO: 28473 - RNA, 22 nt, synthetic construct
  source 1..22: mol_type = other RNA
gaaccagtagtttccctgcagt

SEQ ID NO: 28474 - RNA, 22 nt, synthetic construct
  source 1..22: mol_type = other RNA
gaacgaacatctcaagaaggta

SEQ ID NO: 28475 - RNA, 22 nt, synthetic construct
  source 1..22: mol_type = other RNA
gaagccagtaggtaagaagtgt

SEQ ID NO: 28476 - RNA, 22 nt, synthetic construct
  source 1..22: mol_type = other RNA
gaagctgccacaaaagctagag

SEQ ID NO: 28477 - RNA, 22 nt, synthetic construct
  source 1..22: mol_type = other RNA
gaagggcttgttcctgctgggt

SEQ ID NO: 28478 - RNA, 22 nt, synthetic construct
  source 1..22: mol_type = other RNA
gaaggtataggcctttgtttgt

SEQ ID NO: 28479 - RNA, 22 nt, synthetic construct
  source 1..22: mol_type = other RNA
gaagtccaggattataggatgc

SEQ ID NO: 28480 - RNA, 22 nt, synthetic construct
  source 1..22: mol_type = other RNA
gaagtgttaagagtgtatatgt

SEQ ID NO: 28481 - RNA, 22 nt, synthetic construct
  source 1..22: mol_type = other RNA
gaatacattgtttagagctacc

SEQ ID NO: 28482 - RNA, 22 nt, synthetic construct
  source 1..22: mol_type = other RNA
gaataggctgctgttcctaccc

SEQ ID NO: 28483 - RNA, 22 nt, synthetic construct
  source 1..22: mol_type = other RNA
gaatgagtcccatcccatctga

SEQ ID NO: 28484 - RNA, 22 nt, synthetic construct
  source 1..22: mol_type = other RNA
gaatgttcttaaagatcagatt

SEQ ID NO: 28485 - RNA, 22 nt, synthetic construct
  source 1..22: mol_type = other RNA
gacaatcccaatatgcagattg

SEQ ID NO: 28486 - RNA, 22 nt, synthetic construct
  source 1..22: mol_type = other RNA
gacagcaggacttacaaacaaa

SEQ ID NO: 28487 - RNA, 22 nt, synthetic construct
  source 1..22: mol_type = other RNA
gacatttgttagtacatggtat

SEQ ID NO: 28488 - RNA, 22 nt, synthetic construct
  source 1..22: mol_type = other RNA
gaccttttttatatcaaagcag

SEQ ID NO: 28489 - RNA, 22 nt, synthetic construct
  source 1..22: mol_type = other RNA
gactactcatacacaactttca

SEQ ID NO: 28490 - RNA, 22 nt, synthetic construct
  source 1..22: mol_type = other RNA
gactcattcagggtagtatggc

SEQ ID NO: 28491 - RNA, 22 nt, synthetic construct
  source 1..22: mol_type = other RNA
gacttacaaacaaaggcctata

SEQ ID NO: 28492 - RNA, 22 nt, synthetic construct
  source 1..22: mol_type = other RNA
gacttctccagtactttctggc

SEQ ID NO: 28493 - RNA, 22 nt, synthetic construct
  source 1..22: mol_type = other RNA
gagaagtccaggattataggat

SEQ ID NO: 28494 - RNA, 22 nt, synthetic construct
  source 1..22: mol_type = other RNA
gagatactgatgcacagcatgg

SEQ ID NO: 28495 - RNA, 22 nt, synthetic construct
  source 1..22: mol_type = other RNA
gagatgttcgttcagtgctaaa

SEQ ID NO: 28496 - RNA, 22 nt, synthetic construct
  source 1..22: mol_type = other RNA
gagcagcagcagcacttgcaca

SEQ ID NO: 28497 - RNA, 22 nt, synthetic construct
  source 1..22: mol_type = other RNA
gagcagggagcagcagcagcac

SEQ ID NO: 28498 - RNA, 22 nt, synthetic construct
  source 1..22: mol_type = other RNA
gagctacccagcaggaacaagc

SEQ ID NO: 28499 - RNA, 22 nt, synthetic construct
  source 1..22: mol_type = other RNA
gaggaagccagtaggtaagaag

SEQ ID NO: 28500 - RNA, 22 nt, synthetic construct
  source 1..22: mol_type = other RNA
gaggctagtaggaagggcttgt

SEQ ID NO: 28501 - RNA, 22 nt, synthetic construct
  source 1..22: mol_type = other RNA
gagtagtcatatcataaagctg

SEQ ID NO: 28502 - RNA, 22 nt, synthetic construct
  source 1..22: mol_type = other RNA
gagtcccatcccatctgatata

SEQ ID NO: 28503 - RNA, 22 nt, synthetic construct
  source 1..22: mol_type = other RNA
gagtgtatatgtatttgtgcaa

SEQ ID NO: 28504 - RNA, 22 nt, synthetic construct
  source 1..22: mol_type = other RNA
gataccaatccagccagaaagt

SEQ ID NO: 28505 - RNA, 22 nt, synthetic construct
  source 1..22: mol_type = other RNA
gatactgatgcacagcatggtt

SEQ ID NO: 28506 - RNA, 22 nt, synthetic construct
  source 1..22: mol_type = other RNA
gatataaaaaaggtctatggcc

SEQ ID NO: 28507 - RNA, 22 nt, synthetic construct
  source 1..22: mol_type = other RNA
gatataaacaatctgcatattg

SEQ ID NO: 28508 - RNA, 22 nt, synthetic construct
  source 1..22: mol_type = other RNA
gatatgactactcatacacaac

SEQ ID NO: 28509 - RNA, 22 nt, synthetic construct
  source 1..22: mol_type = other RNA
gatcagattagtggcacctgct

SEQ ID NO: 28510 - RNA, 22 nt, synthetic construct
  source 1..22: mol_type = other RNA
gatctttaagaacattccctga

SEQ ID NO: 28511 - RNA, 22 nt, synthetic construct
  source 1..22: mol_type = other RNA
gatgcacagcatggtttctgaa

SEQ ID NO: 28512 - RNA, 22 nt, synthetic construct
  source 1..22: mol_type = other RNA
gatgctaggacagcaggactta

SEQ ID NO: 28513 - RNA, 22 nt, synthetic construct
  source 1..22: mol_type = other RNA
gatgggactcattcagggtagt

SEQ ID NO: 28514 - RNA, 22 nt, synthetic construct
  source 1..22: mol_type = other RNA
gatgggatgggactcattcagg

SEQ ID NO: 28515 - RNA, 22 nt, synthetic construct
  source 1..22: mol_type = other RNA
gatgttcgttcagtgctaaata

SEQ ID NO: 28516 - RNA, 22 nt, synthetic construct
  source 1..22: mol_type = other RNA
gattagtggcacctgctgagat

SEQ ID NO: 28517 - RNA, 22 nt, synthetic construct
  source 1..22: mol_type = other RNA
gattataggatgctaggacagc

SEQ ID NO: 28518 - RNA, 22 nt, synthetic construct
  source 1..22: mol_type = other RNA
gattggtatctgaggctagtag

SEQ ID NO: 28519 - RNA, 22 nt, synthetic construct
  source 1..22: mol_type = other RNA
gattgtcagggaatgttcttaa

SEQ ID NO: 28520 - RNA, 22 nt, synthetic construct
  source 1..22: mol_type = other RNA
gattgtttatatcagatgggat

SEQ ID NO: 28521 - RNA, 22 nt, synthetic construct
  source 1..22: mol_type = other RNA
gcaagtgctgctgctgctccct

SEQ ID NO: 28522 - RNA, 22 nt, synthetic construct
  source 1..22: mol_type = other RNA
gcacaaatacatatacactctt

SEQ ID NO: 28523 - RNA, 22 nt, synthetic construct
  source 1..22: mol_type = other RNA
gcacagcatggtttctgaacca

SEQ ID NO: 28524 - RNA, 22 nt, synthetic construct
  source 1..22: mol_type = other RNA
gcacctgctgagatactgatgc

SEQ ID NO: 28525 - RNA, 22 nt, synthetic construct
  source 1..22: mol_type = other RNA
gcactgaacgaacatctcaaga

SEQ ID NO: 28526 - RNA, 22 nt, synthetic construct
  source 1..22: mol_type = other RNA
gcacttgcacaaatacatatac

SEQ ID NO: 28527 - RNA, 22 nt, synthetic construct
  source 1..22: mol_type = other RNA
gcagaataggctgctgttccta

SEQ ID NO: 28528 - RNA, 22 nt, synthetic construct
  source 1..22: mol_type = other RNA
gcagattgtttatatcagatgg

SEQ ID NO: 28529 - RNA, 22 nt, synthetic construct
  source 1..22: mol_type = other RNA
gcagcacttgcacaaatacata

SEQ ID NO: 28530 - RNA, 22 nt, synthetic construct
  source 1..22: mol_type = other RNA
gcagcagcacttgcacaaatac

SEQ ID NO: 28531 - RNA, 22 nt, synthetic construct
  source 1..22: mol_type = other RNA
gcagcagcagcacttgcacaaa

SEQ ID NO: 28532 - RNA, 22 nt, synthetic construct
  source 1..22: mol_type = other RNA
gcagcctattctgccagcctta

SEQ ID NO: 28533 - RNA, 22 nt, synthetic construct
  source 1..22: mol_type = other RNA
gcagcttcaggtatatttagca

SEQ ID NO: 28534 - RNA, 22 nt, synthetic construct
  source 1..22: mol_type = other RNA
gcagctttatgatatgactact

SEQ ID NO: 28535 - RNA, 22 nt, synthetic construct
  source 1..22: mol_type = other RNA
gcaggaacaagcccttcctact

SEQ ID NO: 28536 - RNA, 22 nt, synthetic construct
  source 1..22: mol_type = other RNA
gcaggacttacaaacaaaggcc

SEQ ID NO: 28537 - RNA, 22 nt, synthetic construct
  source 1..22: mol_type = other RNA
gcagggaaactactggttcaga

SEQ ID NO: 28538 - RNA, 22 nt, synthetic construct
  source 1..22: mol_type = other RNA
gcagggagcagcagcagcactt

SEQ ID NO: 28539 - RNA, 22 nt, synthetic construct
  source 1..22: mol_type = other RNA
gcaggtgccactaatctgatct

SEQ ID NO: 28540 - RNA, 22 nt, synthetic construct
  source 1..22: mol_type = other RNA
gcagttgagcagggagcagcag

SEQ ID NO: 28541 - RNA, 22 nt, synthetic construct
  source 1..22: mol_type = other RNA
gcatattgggattgtcagggaa

SEQ ID NO: 28542 - RNA, 22 nt, synthetic construct
  source 1..22: mol_type = other RNA
gcatcagtatctcagcaggtgc

SEQ ID NO: 28543 - RNA, 22 nt, synthetic construct
  source 1..22: mol_type = other RNA
gcatcctataatcctggacttc

SEQ ID NO: 28544 - RNA, 22 nt, synthetic construct
  source 1..22: mol_type = other RNA
gcatggtttctgaaccagtagt

SEQ ID NO: 28545 - RNA, 22 nt, synthetic construct
  source 1..22: mol_type = other RNA
gccacaaaagctagaggaagcc

SEQ ID NO: 28546 - RNA, 22 nt, synthetic construct
  source 1..22: mol_type = other RNA
gccactaatctgatctttaaga

SEQ ID NO: 28547 - RNA, 22 nt, synthetic construct
  source 1..22: mol_type = other RNA
gccagaaagtactggagaagtc

SEQ ID NO: 28548 - RNA, 22 nt, synthetic construct
  source 1..22: mol_type = other RNA
gccagccttatttctaaccatt

SEQ ID NO: 28549 - RNA, 22 nt, synthetic construct
  source 1..22: mol_type = other RNA
gccagtaggtaagaagtgttaa

SEQ ID NO: 28550 - RNA, 22 nt, synthetic construct
  source 1..22: mol_type = other RNA
gccatactaccctgaatgagtc

SEQ ID NO: 28551 - RNA, 22 nt, synthetic construct
  source 1..22: mol_type = other RNA
gccatagaccttttttatatca

SEQ ID NO: 28552 - RNA, 22 nt, synthetic construct
  source 1..22: mol_type = other RNA
gcccttcctactagcctcagat

SEQ ID NO: 28553 - RNA, 22 nt, synthetic construct
  source 1..22: mol_type = other RNA
gcctataccttcttgagatgtt

SEQ ID NO: 28554 - RNA, 22 nt, synthetic construct
  source 1..22: mol_type = other RNA
gcctattctgccagccttattt

SEQ ID NO: 28555 - RNA, 22 nt, synthetic construct
  source 1..22: mol_type = other RNA
gcctcagataccaatccagcca

SEQ ID NO: 28556 - RNA, 22 nt, synthetic construct
  source 1..22: mol_type = other RNA
gccttatttctaaccattttag

SEQ ID NO: 28557 - RNA, 22 nt, synthetic construct
  source 1..22: mol_type = other RNA
gcctttgtttgtaagtcctgct

SEQ ID NO: 28558 - RNA, 22 nt, synthetic construct
  source 1..22: mol_type = other RNA
gctaaatatacctgaagctgcc

SEQ ID NO: 28559 - RNA, 22 nt, synthetic construct
  source 1..22: mol_type = other RNA
gctacccagcaggaacaagccc

SEQ ID NO: 28560 - RNA, 22 nt, synthetic construct
  source 1..22: mol_type = other RNA
gctagaggaagccagtaggtaa

SEQ ID NO: 28561 - RNA, 22 nt, synthetic construct
  source 1..22: mol_type = other RNA
gctaggacagcaggacttacaa

SEQ ID NO: 28562 - RNA, 22 nt, synthetic construct
  source 1..22: mol_type = other RNA
gctagtaggaagggcttgttcc

SEQ ID NO: 28563 - RNA, 22 nt, synthetic construct
  source 1..22: mol_type = other RNA
gctcaactgcagggaaactact

SEQ ID NO: 28564 - RNA, 22 nt, synthetic construct
  source 1..22: mol_type = other RNA
gctccctgctcaactgcaggga

SEQ ID NO: 28565 - RNA, 22 nt, synthetic construct
  source 1..22: mol_type = other RNA
gctctaaacaatgtattcatgg

SEQ ID NO: 28566 - RNA, 22 nt, synthetic construct
  source 1..22: mol_type = other RNA
gctgaaagttgtgtatgagtag

SEQ ID NO: 28567 - RNA, 22 nt, synthetic construct
  source 1..22: mol_type = other RNA
gctgagatactgatgcacagca

SEQ ID NO: 28568 - RNA, 22 nt, synthetic construct
  source 1..22: mol_type = other RNA
gctgccacaaaagctagaggaa

SEQ ID NO: 28569 - RNA, 22 nt, synthetic construct
  source 1..22: mol_type = other RNA
gctgctccctgctcaactgcag

SEQ ID NO: 28570 - RNA, 22 nt, synthetic construct
  source 1..22: mol_type = other RNA
gctgctgaaagttgtgtatgag

SEQ ID NO: 28571 - RNA, 22 nt, synthetic construct
  source 1..22: mol_type = other RNA
gctgctgctccctgctcaactg

SEQ ID NO: 28572 - RNA, 22 nt, synthetic construct
  source 1..22: mol_type = other RNA
gctgctgctgctccctgctcaa

SEQ ID NO: 28573 - RNA, 22 nt, synthetic construct
  source 1..22: mol_type = other RNA
gctgctgttcctacccatgaat

SEQ ID NO: 28574 - RNA, 22 nt, synthetic construct
  source 1..22: mol_type = other RNA
gctgctttgatataaaaaaggt

SEQ ID NO: 28575 - RNA, 22 nt, synthetic construct
  source 1..22: mol_type = other RNA
gctggattggtatctgaggcta

SEQ ID NO: 28576 - RNA, 22 nt, synthetic construct
  source 1..22: mol_type = other RNA
gctggcagaataggctgctgtt

SEQ ID NO: 28577 - RNA, 22 nt, synthetic construct
  source 1..22: mol_type = other RNA
gctgggtagctctaaacaatgt

SEQ ID NO: 28578 - RNA, 22 nt, synthetic construct
  source 1..22: mol_type = other RNA
gctgtcctagcatcctataatc

SEQ ID NO: 28579 - RNA, 22 nt, synthetic construct
  source 1..22: mol_type = other RNA
gctgtgcatcagtatctcagca

SEQ ID NO: 28580 - RNA, 22 nt, synthetic construct
  source 1..22: mol_type = other RNA
gctgttcctacccatgaataca

SEQ ID NO: 28581 - RNA, 22 nt, synthetic construct
  source 1..22: mol_type = other RNA
gcttcaggtatatttagcactg

SEQ ID NO: 28582 - RNA, 22 nt, synthetic construct
  source 1..22: mol_type = other RNA
gcttcctctagcttttgtggca

SEQ ID NO: 28583 - RNA, 22 nt, synthetic construct
  source 1..22: mol_type = other RNA
gcttgttcctgctgggtagctc

SEQ ID NO: 28584 - RNA, 22 nt, synthetic construct
  source 1..22: mol_type = other RNA
gctttatgatatgactactcat

SEQ ID NO: 28585 - RNA, 22 nt, synthetic construct
  source 1..22: mol_type = other RNA
gctttgatataaaaaaggtcta

SEQ ID NO: 28586 - RNA, 22 nt, synthetic construct
  source 1..22: mol_type = other RNA
gcttttgtggcagcttcaggta

SEQ ID NO: 28587 - RNA, 22 nt, synthetic construct
  source 1..22: mol_type = other RNA
ggaaactactggttcagaaacc

SEQ ID NO: 28588 - RNA, 22 nt, synthetic construct
  source 1..22: mol_type = other RNA
ggaacaagcccttcctactagc

SEQ ID NO: 28589 - RNA, 22 nt, synthetic construct
  source 1..22: mol_type = other RNA
ggaacagcagcctattctgcca

SEQ ID NO: 28590 - RNA, 22 nt, synthetic construct
  source 1..22: mol_type = other RNA
ggaagacattaagttttacttt

SEQ ID NO: 28591 - RNA, 22 nt, synthetic construct
  source 1..22: mol_type = other RNA
ggaagccagtaggtaagaagtg

SEQ ID NO: 28592 - RNA, 22 nt, synthetic construct
  source 1..22: mol_type = other RNA
ggaagggcttgttcctgctggg

SEQ ID NO: 28593 - RNA, 22 nt, synthetic construct
  source 1..22: mol_type = other RNA
ggaatgttcttaaagatcagat

SEQ ID NO: 28594 - RNA, 22 nt, synthetic construct
  source 1..22: mol_type = other RNA
ggacagcaggacttacaaacaa

SEQ ID NO: 28595 - RNA, 22 nt, synthetic construct
  source 1..22: mol_type = other RNA
ggactcattcagggtagtatgg

SEQ ID NO: 28596 - RNA, 22 nt, synthetic construct
  source 1..22: mol_type = other RNA
ggacttacaaacaaaggcctat

SEQ ID NO: 28597 - RNA, 22 nt, synthetic construct
  source 1..22: mol_type = other RNA
ggacttctccagtactttctgg

SEQ ID NO: 28598 - RNA, 22 nt, synthetic construct
  source 1..22: mol_type = other RNA
ggagaagtccaggattatagga

SEQ ID NO: 28599 - RNA, 22 nt, synthetic construct
  source 1..22: mol_type = other RNA
ggagcagcagcagcacttgcac

SEQ ID NO: 28600 - RNA, 22 nt, synthetic construct
  source 1..22: mol_type = other RNA
ggatgctaggacagcaggactt

SEQ ID NO: 28601 - RNA, 22 nt, synthetic construct
  source 1..22: mol_type = other RNA
ggatgggactcattcagggtag

SEQ ID NO: 28602 - RNA, 22 nt, synthetic construct
  source 1..22: mol_type = other RNA
ggattataggatgctaggacag

SEQ ID NO: 28603 - RNA, 22 nt, synthetic construct
  source 1..22: mol_type = other RNA
ggattggtatctgaggctagta

SEQ ID NO: 28604 - RNA, 22 nt, synthetic construct
  source 1..22: mol_type = other RNA
ggattgtcagggaatgttctta

SEQ ID NO: 28605 - RNA, 22 nt, synthetic construct
  source 1..22: mol_type = other RNA
ggcacctgctgagatactgatg

SEQ ID NO: 28606 - RNA, 22 nt, synthetic construct
  source 1..22: mol_type = other RNA
ggcagaataggctgctgttcct

SEQ ID NO: 28607 - RNA, 22 nt, synthetic construct
  source 1..22: mol_type = other RNA
ggcagcttcaggtatatttagc

SEQ ID NO: 28608 - RNA, 22 nt, synthetic construct
  source 1..22: mol_type = other RNA
ggccatactaccctgaatgagt

SEQ ID NO: 28609 - RNA, 22 nt, synthetic construct
  source 1..22: mol_type = other RNA
ggccatagaccttttttatatc

SEQ ID NO: 28610 - RNA, 22 nt, synthetic construct
  source 1..22: mol_type = other RNA
ggcctataccttcttgagatgt

SEQ ID NO: 28611 - RNA, 22 nt, synthetic construct
  source 1..22: mol_type = other RNA
ggcctttgtttgtaagtcctgc

SEQ ID NO: 28612 - RNA, 22 nt, synthetic construct
  source 1..22: mol_type = other RNA
ggctagtaggaagggcttgttc

SEQ ID NO: 28613 - RNA, 22 nt, synthetic construct
  source 1..22: mol_type = other RNA
ggctgctgttcctacccatgaa

SEQ ID NO: 28614 - RNA, 22 nt, synthetic construct
  source 1..22: mol_type = other RNA
ggctggattggtatctgaggct

SEQ ID NO: 28615 - RNA, 22 nt, synthetic construct
  source 1..22: mol_type = other RNA
ggctggcagaataggctgctgt

SEQ ID NO: 28616 - RNA, 22 nt, synthetic construct
  source 1..22: mol_type = other RNA
ggcttcctctagcttttgtggc

SEQ ID NO: 28617 - RNA, 22 nt, synthetic construct
  source 1..22: mol_type = other RNA
ggcttgttcctgctgggtagct

SEQ ID NO: 28618 - RNA, 22 nt, synthetic construct
  source 1..22: mol_type = other RNA
gggaaactactggttcagaaac

SEQ ID NO: 28619 - RNA, 22 nt, synthetic construct
  source 1..22: mol_type = other RNA
gggaatgttcttaaagatcaga

SEQ ID NO: 28620 - RNA, 22 nt, synthetic construct
  source 1..22: mol_type = other RNA
gggactcattcagggtagtatg

SEQ ID NO: 28621 - RNA, 22 nt, synthetic construct
  source 1..22: mol_type = other RNA
gggagcagcagcagcacttgca

SEQ ID NO: 28622 - RNA, 22 nt, synthetic construct
  source 1..22: mol_type = other RNA
gggatgggactcattcagggta

SEQ ID NO: 28623 - RNA, 22 nt, synthetic construct
  source 1..22: mol_type = other RNA
gggattgtcagggaatgttctt

SEQ ID NO: 28624 - RNA, 22 nt, synthetic construct
  source 1..22: mol_type = other RNA
gggcttgttcctgctgggtagc

SEQ ID NO: 28625 - RNA, 22 nt, synthetic construct
  source 1..22: mol_type = other RNA
gggtagctctaaacaatgtatt

SEQ ID NO: 28626 - RNA, 22 nt, synthetic construct
  source 1..22: mol_type = other RNA
gggtaggaacagcagcctattc

SEQ ID NO: 28627 - RNA, 22 nt, synthetic construct
  source 1..22: mol_type = other RNA
gggtagtatggccatagacctt

SEQ ID NO: 28628 - RNA, 22 nt, synthetic construct
  source 1..22: mol_type = other RNA
ggtaagaagtgttaagagtgta

SEQ ID NO: 28629 - RNA, 22 nt, synthetic construct
  source 1..22: mol_type = other RNA
ggtagctctaaacaatgtattc

SEQ ID NO: 28630 - RNA, 22 nt, synthetic construct
  source 1..22: mol_type = other RNA
ggtaggaacagcagcctattct

SEQ ID NO: 28631 - RNA, 22 nt, synthetic construct
  source 1..22: mol_type = other RNA
ggtagtatggccatagaccttt

SEQ ID NO: 28632 - RNA, 22 nt, synthetic construct
  source 1..22: mol_type = other RNA
ggtataggcctttgtttgtaag

SEQ ID NO: 28633 - RNA, 22 nt, synthetic construct
  source 1..22: mol_type = other RNA
ggtatatttagcactgaacgaa

SEQ ID NO: 28634 - RNA, 22 nt, synthetic construct
  source 1..22: mol_type = other RNA
ggtatctgaggctagtaggaag

SEQ ID NO: 28635 - RNA, 22 nt, synthetic construct
  source 1..22: mol_type = other RNA
ggtctatggccatactaccctg

SEQ ID NO: 28636 - RNA, 22 nt, synthetic construct
  source 1..22: mol_type = other RNA
ggtgccactaatctgatcttta

SEQ ID NO: 28637 - RNA, 22 nt, synthetic construct
  source 1..22: mol_type = other RNA
ggttagaaataaggctggcaga

SEQ ID NO: 28638 - RNA, 22 nt, synthetic construct
  source 1..22: mol_type = other RNA
ggttcagaaaccatgctgtgca

SEQ ID NO: 28639 - RNA, 22 nt, synthetic construct
  source 1..22: mol_type = other RNA
ggtttctgaaccagtagtttcc

SEQ ID NO: 28640 - RNA, 22 nt, synthetic construct
  source 1..22: mol_type = other RNA
gtaaaacttaatgtcttccttt

SEQ ID NO: 28641 - RNA, 22 nt, synthetic construct
  source 1..22: mol_type = other RNA
gtaagaagtgttaagagtgtat

SEQ ID NO: 28642 - RNA, 22 nt, synthetic construct
  source 1..22: mol_type = other RNA
gtaagctgctgaaagttgtgta

SEQ ID NO: 28643 - RNA, 22 nt, synthetic construct
  source 1..22: mol_type = other RNA
gtaagtcctgctgtcctagcat

SEQ ID NO: 28644 - RNA, 22 nt, synthetic construct
  source 1..22: mol_type = other RNA
gtaagtcttacattcttttgta

SEQ ID NO: 28645 - RNA, 22 nt, synthetic construct
  source 1..22: mol_type = other RNA
gtactaacaaatgtctaaaatg

SEQ ID NO: 28646 - RNA, 22 nt, synthetic construct
  source 1..22: mol_type = other RNA
gtactggagaagtccaggatta

SEQ ID NO: 28647 - RNA, 22 nt, synthetic construct
  source 1..22: mol_type = other RNA
gtactttctggctggattggta

SEQ ID NO: 28648 - RNA, 22 nt, synthetic construct
  source 1..22: mol_type = other RNA
gtagctctaaacaatgtattca

SEQ ID NO: 28649 - RNA, 22 nt, synthetic construct
  source 1..22: mol_type = other RNA
gtaggaacagcagcctattctg

SEQ ID NO: 28650 - RNA, 22 nt, synthetic construct
  source 1..22: mol_type = other RNA
gtaggaagggcttgttcctgct

SEQ ID NO: 28651 - RNA, 22 nt, synthetic construct
  source 1..22: mol_type = other RNA
gtaggtaagaagtgttaagagt

SEQ ID NO: 28652 - RNA, 22 nt, synthetic construct
  source 1..22: mol_type = other RNA
gtagtatggccatagacctttt

SEQ ID NO: 28653 - RNA, 22 nt, synthetic construct
  source 1..22: mol_type = other RNA
gtagtcatatcataaagctgct

SEQ ID NO: 28654 - RNA, 22 nt, synthetic construct
  source 1..22: mol_type = other RNA
gtagtttccctgcagttgagca

SEQ ID NO: 28655 - RNA, 22 nt, synthetic construct
  source 1..22: mol_type = other RNA
gtataggcctttgtttgtaagt

SEQ ID NO: 28656 - RNA, 22 nt, synthetic construct
  source 1..22: mol_type = other RNA
gtatatgtatttgtgcaagtgc

SEQ ID NO: 28657 - RNA, 22 nt, synthetic construct
  source 1..22: mol_type = other RNA
gtatatttagcactgaacgaac

SEQ ID NO: 28658 - RNA, 22 nt, synthetic construct
  source 1..22: mol_type = other RNA
gtatctcagcaggtgccactaa

SEQ ID NO: 28659 - RNA, 22 nt, synthetic construct
  source 1..22: mol_type = other RNA
gtatctgaggctagtaggaagg

SEQ ID NO: 28660 - RNA, 22 nt, synthetic construct
  source 1..22: mol_type = other RNA
gtatgagtagtcatatcataaa

SEQ ID NO: 28661 - RNA, 22 nt, synthetic construct
  source 1..22: mol_type = other RNA
gtatggccatagacctttttta

SEQ ID NO: 28662 - RNA, 22 nt, synthetic construct
  source 1..22: mol_type = other RNA
gtattcatgggtaggaacagca

SEQ ID NO: 28663 - RNA, 22 nt, synthetic construct
  source 1..22: mol_type = other RNA
gtatttgtgcaagtgctgctgc

SEQ ID NO: 28664 - RNA, 22 nt, synthetic construct
  source 1..22: mol_type = other RNA
gtcagggaatgttcttaaagat

SEQ ID NO: 28665 - RNA, 22 nt, synthetic construct
  source 1..22: mol_type = other RNA
gtcatatcataaagctgctttg

SEQ ID NO: 28666 - RNA, 22 nt, synthetic construct
  source 1..22: mol_type = other RNA
gtccaggattataggatgctag

SEQ ID NO: 28667 - RNA, 22 nt, synthetic construct
  source 1..22: mol_type = other RNA
gtcccatcccatctgatataaa

SEQ ID NO: 28668 - RNA, 22 nt, synthetic construct
  source 1..22: mol_type = other RNA
gtcctagcatcctataatcctg

SEQ ID NO: 28669 - RNA, 22 nt, synthetic construct
  source 1..22: mol_type = other RNA
gtcctgctgtcctagcatccta

SEQ ID NO: 28670 - RNA, 22 nt, synthetic construct
  source 1..22: mol_type = other RNA
gtctaaaatggttagaaataag

SEQ ID NO: 28671 - RNA, 22 nt, synthetic construct
  source 1..22: mol_type = other RNA
gtctatggccatactaccctga

SEQ ID NO: 28672 - RNA, 22 nt, synthetic construct
  source 1..22: mol_type = other RNA
gtcttacattcttttgtaagct

SEQ ID NO: 28673 - RNA, 22 nt, synthetic construct
  source 1..22: mol_type = other RNA
gtgcaagtgctgctgctgctcc

SEQ ID NO: 28674 - RNA, 22 nt, synthetic construct
  source 1..22: mol_type = other RNA
gtgcatcagtatctcagcaggt

SEQ ID NO: 28675 - RNA, 22 nt, synthetic construct
  source 1..22: mol_type = other RNA
gtgccactaatctgatctttaa

SEQ ID NO: 28676 - RNA, 22 nt, synthetic construct
  source 1..22: mol_type = other RNA
gtgctaaatatacctgaagctg

SEQ ID NO: 28677 - RNA, 22 nt, synthetic construct
  source 1..22: mol_type = other RNA
gtgctgctgctgctccctgctc

SEQ ID NO: 28678 - RNA, 22 nt, synthetic construct
  source 1..22: mol_type = other RNA
gtggcacctgctgagatactga

SEQ ID NO: 28679 - RNA, 22 nt, synthetic construct
  source 1..22: mol_type = other RNA
gtggcagcttcaggtatattta

SEQ ID NO: 28680 - RNA, 22 nt, synthetic construct
  source 1..22: mol_type = other RNA
gtgtatatgtatttgtgcaagt

SEQ ID NO: 28681 - RNA, 22 nt, synthetic construct
  source 1..22: mol_type = other RNA
gtgtatgagtagtcatatcata

SEQ ID NO: 28682 - RNA, 22 nt, synthetic construct
  source 1..22: mol_type = other RNA
gtgttaagagtgtatatgtatt

SEQ ID NO: 28683 - RNA, 22 nt, synthetic construct
  source 1..22: mol_type = other RNA
gttaagagtgtatatgtatttg

SEQ ID NO: 28684 - RNA, 22 nt, synthetic construct
  source 1..22: mol_type = other RNA
gttagaaataaggctggcagaa

SEQ ID NO: 28685 - RNA, 22 nt, synthetic construct
  source 1..22: mol_type = other RNA
gttcagaaaccatgctgtgcat

SEQ ID NO: 28686 - RNA, 22 nt, synthetic construct
  source 1..22: mol_type = other RNA
gttcagtgctaaatatacctga

SEQ ID NO: 28687 - RNA, 22 nt, synthetic construct
  source 1..22: mol_type = other RNA
gttcctacccatgaatacattg

SEQ ID NO: 28688 - RNA, 22 nt, synthetic construct
  source 1..22: mol_type = other RNA
gttcctgctgggtagctctaaa

SEQ ID NO: 28689 - RNA, 22 nt, synthetic construct
  source 1..22: mol_type = other RNA
gttcgttcagtgctaaatatac

SEQ ID NO: 28690 - RNA, 22 nt, synthetic construct
  source 1..22: mol_type = other RNA
gttcttaaagatcagattagtg

SEQ ID NO: 28691 - RNA, 22 nt, synthetic construct
  source 1..22: mol_type = other RNA
gttgagcagggagcagcagcag

SEQ ID NO: 28692 - RNA, 22 nt, synthetic construct
  source 1..22: mol_type = other RNA
gttgtgtatgagtagtcatatc

SEQ ID NO: 28693 - RNA, 22 nt, synthetic construct
  source 1..22: mol_type = other RNA
gtttagagctacccagcaggaa

SEQ ID NO: 28694 - RNA, 22 nt, synthetic construct
  source 1..22: mol_type = other RNA
gtttatatcagatgggatggga

SEQ ID NO: 28695 - RNA, 22 nt, synthetic construct
  source 1..22: mol_type = other RNA
gtttccctgcagttgagcaggg

SEQ ID NO: 28696 - RNA, 22 nt, synthetic construct
  source 1..22: mol_type = other RNA
gtttctgaaccagtagtttccc

SEQ ID NO: 28697 - RNA, 22 nt, synthetic construct
  source 1..22: mol_type = other RNA
gtttgtaagtcctgctgtccta

SEQ ID NO: 28698 - RNA, 22 nt, synthetic construct
  source 1..22: mol_type = other RNA
taaaaaaggtctatggccatac

SEQ ID NO: 28699 - RNA, 22 nt, synthetic construct
  source 1..22: mol_type = other RNA
taaaatggttagaaataaggct

SEQ ID NO: 28700 - RNA, 22 nt, synthetic construct
  source 1..22: mol_type = other RNA
taaacaatctgcatattgggat

SEQ ID NO: 28701 - RNA, 22 nt, synthetic construct
  source 1..22: mol_type = other RNA
taaacaatgtattcatgggtag

SEQ ID NO: 28702 - RNA, 22 nt, synthetic construct
  source 1..22: mol_type = other RNA
taaagatcagattagtggcacc

SEQ ID NO: 28703 - RNA, 22 nt, synthetic construct
  source 1..22: mol_type = other RNA
taaatatacctgaagctgccac

SEQ ID NO: 28704 - RNA, 22 nt, synthetic construct
  source 1..22: mol_type = other RNA
taacacttcttacctactggct

SEQ ID NO: 28705 - RNA, 22 nt, synthetic construct
  source 1..22: mol_type = other RNA
taagaacattccctgacaatcc

SEQ ID NO: 28706 - RNA, 22 nt, synthetic construct
  source 1..22: mol_type = other RNA
taagaagtgttaagagtgtata

SEQ ID NO: 28707 - RNA, 22 nt, synthetic construct
  source 1..22: mol_type = other RNA
taagagtgtatatgtatttgtg

SEQ ID NO: 28708 - RNA, 22 nt, synthetic construct
  source 1..22: mol_type = other RNA
taagctgctgaaagttgtgtat

SEQ ID NO: 28709 - RNA, 22 nt, synthetic construct
  source 1..22: mol_type = other RNA
taaggctggcagaataggctgc

SEQ ID NO: 28710 - RNA, 22 nt, synthetic construct
  source 1..22: mol_type = other RNA
taagtcctgctgtcctagcatc

SEQ ID NO: 28711 - RNA, 22 nt, synthetic construct
  source 1..22: mol_type = other RNA
taatcctggacttctccagtac

SEQ ID NO: 28712 - RNA, 22 nt, synthetic construct
  source 1..22: mol_type = other RNA
tacaaacaaaggcctatacctt

SEQ ID NO: 28713 - RNA, 22 nt, synthetic construct
  source 1..22: mol_type = other RNA
tacacaactttcagcagcttac

SEQ ID NO: 28714 - RNA, 22 nt, synthetic construct
  source 1..22: mol_type = other RNA
tacactcttaacacttcttacc

SEQ ID NO: 28715 - RNA, 22 nt, synthetic construct
  source 1..22: mol_type = other RNA
tacatatacactcttaacactt

SEQ ID NO: 28716 - RNA, 22 nt, synthetic construct
  source 1..22: mol_type = other RNA
tacattcttttgtaagctgctg

SEQ ID NO: 28717 - RNA, 22 nt, synthetic construct
  source 1..22: mol_type = other RNA
tacattgtttagagctacccag

SEQ ID NO: 28718 - RNA, 22 nt, synthetic construct
  source 1..22: mol_type = other RNA
taccaatccagccagaaagtac

SEQ ID NO: 28719 - RNA, 22 nt, synthetic construct
  source 1..22: mol_type = other RNA
taccatgtactaacaaatgtct

SEQ ID NO: 28720 - RNA, 22 nt, synthetic construct
  source 1..22: mol_type = other RNA
tacccagcaggaacaagccctt

SEQ ID NO: 28721 - RNA, 22 nt, synthetic construct
  source 1..22: mol_type = other RNA
tacccatgaatacattgtttag

SEQ ID NO: 28722 - RNA, 22 nt, synthetic construct
  source 1..22: mol_type = other RNA
taccctgaatgagtcccatccc

SEQ ID NO: 28723 - RNA, 22 nt, synthetic construct
  source 1..22: mol_type = other RNA
tacctactggcttcctctagct

SEQ ID NO: 28724 - RNA, 22 nt, synthetic construct
  source 1..22: mol_type = other RNA
tacctgaagctgccacaaaagc

SEQ ID NO: 28725 - RNA, 22 nt, synthetic construct
  source 1..22: mol_type = other RNA
taccttcttgagatgttcgttc

SEQ ID NO: 28726 - RNA, 22 nt, synthetic construct
  source 1..22: mol_type = other RNA
tactaacaaatgtctaaaatgg

SEQ ID NO: 28727 - RNA, 22 nt, synthetic construct
  source 1..22: mol_type = other RNA
tactaccctgaatgagtcccat

SEQ ID NO: 28728 - RNA, 22 nt, synthetic construct
  source 1..22: mol_type = other RNA
tactagcctcagataccaatcc

SEQ ID NO: 28729 - RNA, 22 nt, synthetic construct
  source 1..22: mol_type = other RNA
tactcatacacaactttcagca

SEQ ID NO: 28730 - RNA, 22 nt, synthetic construct
  source 1..22: mol_type = other RNA
tactgatgcacagcatggtttc

SEQ ID NO: 28731 - RNA, 22 nt, synthetic construct
  source 1..22: mol_type = other RNA
tactggagaagtccaggattat

SEQ ID NO: 28732 - RNA, 22 nt, synthetic construct
  source 1..22: mol_type = other RNA
tactggcttcctctagcttttg

SEQ ID NO: 28733 - RNA, 22 nt, synthetic construct
  source 1..22: mol_type = other RNA
tactggttcagaaaccatgctg

SEQ ID NO: 28734 - RNA, 22 nt, synthetic construct
  source 1..22: mol_type = other RNA
tactttctggctggattggtat

SEQ ID NO: 28735 - RNA, 22 nt, synthetic construct
  source 1..22: mol_type = other RNA
tagaaataaggctggcagaata

SEQ ID NO: 28736 - RNA, 22 nt, synthetic construct
  source 1..22: mol_type = other RNA
tagacatttgttagtacatggt

SEQ ID NO: 28737 - RNA, 22 nt, synthetic construct
  source 1..22: mol_type = other RNA
tagaccttttttatatcaaagc

SEQ ID NO: 28738 - RNA, 22 nt, synthetic construct
  source 1..22: mol_type = other RNA
tagagctacccagcaggaacaa

SEQ ID NO: 28739 - RNA, 22 nt, synthetic construct
  source 1..22: mol_type = other RNA
tagaggaagccagtaggtaaga

SEQ ID NO: 28740 - RNA, 22 nt, synthetic construct
  source 1..22: mol_type = other RNA
tagcactgaacgaacatctcaa

SEQ ID NO: 28741 - RNA, 22 nt, synthetic construct
  source 1..22: mol_type = other RNA
tagcatcctataatcctggact

SEQ ID NO: 28742 - RNA, 22 nt, synthetic construct
  source 1..22: mol_type = other RNA
tagcctcagataccaatccagc

SEQ ID NO: 28743 - RNA, 22 nt, synthetic construct
  source 1..22: mol_type = other RNA
tagctctaaacaatgtattcat

SEQ ID NO: 28744 - RNA, 22 nt, synthetic construct
  source 1..22: mol_type = other RNA
tagcttttgtggcagcttcagg

SEQ ID NO: 28745 - RNA, 22 nt, synthetic construct
  source 1..22: mol_type = other RNA
taggaacagcagcctattctgc

SEQ ID NO: 28746 - RNA, 22 nt, synthetic construct
  source 1..22: mol_type = other RNA
taggaagggcttgttcctgctg

SEQ ID NO: 28747 - RNA, 22 nt, synthetic construct
  source 1..22: mol_type = other RNA
taggacagcaggacttacaaac

SEQ ID NO: 28748 - RNA, 22 nt, synthetic construct
  source 1..22: mol_type = other RNA
taggatgctaggacagcaggac

SEQ ID NO: 28749 - RNA, 22 nt, synthetic construct
  source 1..22: mol_type = other RNA
taggcctttgtttgtaagtcct

SEQ ID NO: 28750 - RNA, 22 nt, synthetic construct
  source 1..22: mol_type = other RNA
taggctgctgttcctacccatg

SEQ ID NO: 28751 - RNA, 22 nt, synthetic construct
  source 1..22: mol_type = other RNA
taggtaagaagtgttaagagtg

SEQ ID NO: 28752 - RNA, 22 nt, synthetic construct
  source 1..22: mol_type = other RNA
tagtaggaagggcttgttcctg

SEQ ID NO: 28753 - RNA, 22 nt, synthetic construct
  source 1..22: mol_type = other RNA
tagtatggccatagaccttttt

SEQ ID NO: 28754 - RNA, 22 nt, synthetic construct
  source 1..22: mol_type = other RNA
tagtcatatcataaagctgctt

SEQ ID NO: 28755 - RNA, 22 nt, synthetic construct
  source 1..22: mol_type = other RNA
tagtggcacctgctgagatact

SEQ ID NO: 28756 - RNA, 22 nt, synthetic construct
  source 1..22: mol_type = other RNA
tagtttccctgcagttgagcag

SEQ ID NO: 28757 - RNA, 22 nt, synthetic construct
  source 1..22: mol_type = other RNA
tataaaaaaggtctatggccat

SEQ ID NO: 28758 - RNA, 22 nt, synthetic construct
  source 1..22: mol_type = other RNA
tataaacaatctgcatattggg

SEQ ID NO: 28759 - RNA, 22 nt, synthetic construct
  source 1..22: mol_type = other RNA
tataatcctggacttctccagt

SEQ ID NO: 28760 - RNA, 22 nt, synthetic construct
  source 1..22: mol_type = other RNA
tatacactcttaacacttctta

SEQ ID NO: 28761 - RNA, 22 nt, synthetic construct
  source 1..22: mol_type = other RNA
tatacctgaagctgccacaaaa

SEQ ID NO: 28762 - RNA, 22 nt, synthetic construct
  source 1..22: mol_type = other RNA
tataccttcttgagatgttcgt

SEQ ID NO: 28763 - RNA, 22 nt, synthetic construct
  source 1..22: mol_type = other RNA
tataggatgctaggacagcagg

SEQ ID NO: 28764 - RNA, 22 nt, synthetic construct
  source 1..22: mol_type = other RNA
tataggcctttgtttgtaagtc

SEQ ID NO: 28765 - RNA, 22 nt, synthetic construct
  source 1..22: mol_type = other RNA
tatatcaaagcagctttatgat

SEQ ID NO: 28766 - RNA, 22 nt, synthetic construct
  source 1..22: mol_type = other RNA
tatatcagatgggatgggactc

SEQ ID NO: 28767 - RNA, 22 nt, synthetic construct
  source 1..22: mol_type = other RNA
tatatgtatttgtgcaagtgct

SEQ ID NO: 28768 - RNA, 22 nt, synthetic construct
  source 1..22: mol_type = other RNA
tatatttagcactgaacgaaca

SEQ ID NO: 28769 - RNA, 22 nt, synthetic construct
  source 1..22: mol_type = other RNA
tatcaaagcagctttatgatat

SEQ ID NO: 28770 - RNA, 22 nt, synthetic construct
  source 1..22: mol_type = other RNA
tatcagatgggatgggactcat

SEQ ID NO: 28771 - RNA, 22 nt, synthetic construct
  source 1..22: mol_type = other RNA
tatcataaagctgctttgatat

SEQ ID NO: 28772 - RNA, 22 nt, synthetic construct
  source 1..22: mol_type = other RNA
tatctcagcaggtgccactaat

SEQ ID NO: 28773 - RNA, 22 nt, synthetic construct
  source 1..22: mol_type = other RNA
tatctgaggctagtaggaaggg

SEQ ID NO: 28774 - RNA, 22 nt, synthetic construct
  source 1..22: mol_type = other RNA
tatgaaaaagacagtggagaaa

SEQ ID NO: 28775 - RNA, 22 nt, synthetic construct
  source 1..22: mol_type = other RNA
tatgactactcatacacaactt

SEQ ID NO: 28776 - RNA, 22 nt, synthetic construct
  source 1..22: mol_type = other RNA
tatgagtagtcatatcataaag

SEQ ID NO: 28777 - RNA, 22 nt, synthetic construct
  source 1..22: mol_type = other RNA
tatgatatgactactcatacac

SEQ ID NO: 28778 - RNA, 22 nt, synthetic construct
  source 1..22: mol_type = other RNA
tatgcagattgtttatatcaga

SEQ ID NO: 28779 - RNA, 22 nt, synthetic construct
  source 1..22: mol_type = other RNA
tatggccatactaccctgaatg

SEQ ID NO: 28780 - RNA, 22 nt, synthetic construct
  source 1..22: mol_type = other RNA
tatggccatagaccttttttat

SEQ ID NO: 28781 - RNA, 22 nt, synthetic construct
  source 1..22: mol_type = other RNA
tatgtatttgtgcaagtgctgc

SEQ ID NO: 28782 - RNA, 22 nt, synthetic construct
  source 1..22: mol_type = other RNA
tattcatgggtaggaacagcag

SEQ ID NO: 28783 - RNA, 22 nt, synthetic construct
  source 1..22: mol_type = other RNA
tattctgccagccttatttcta

SEQ ID NO: 28784 - RNA, 22 nt, synthetic construct
  source 1..22: mol_type = other RNA
tattgggattgtcagggaatgt

SEQ ID NO: 28785 - RNA, 22 nt, synthetic construct
  source 1..22: mol_type = other RNA
tatttagcactgaacgaacatc

SEQ ID NO: 28786 - RNA, 22 nt, synthetic construct
  source 1..22: mol_type = other RNA
tatttgtgcaagtgctgctgct

SEQ ID NO: 28787 - RNA, 22 nt, synthetic construct
  source 1..22: mol_type = other RNA
tcaaagcagctttatgatatga

SEQ ID NO: 28788 - RNA, 22 nt, synthetic construct
  source 1..22: mol_type = other RNA
tcaactgcagggaaactactgg

SEQ ID NO: 28789 - RNA, 22 nt, synthetic construct
  source 1..22: mol_type = other RNA
tcaagaaggtataggcctttgt

SEQ ID NO: 28790 - RNA, 22 nt, synthetic construct
  source 1..22: mol_type = other RNA
tcagaaaccatgctgtgcatca

SEQ ID NO: 28791 - RNA, 22 nt, synthetic construct
  source 1..22: mol_type = other RNA
tcagataccaatccagccagaa

SEQ ID NO: 28792 - RNA, 22 nt, synthetic construct
  source 1..22: mol_type = other RNA
tcagatgggatgggactcattc

SEQ ID NO: 28793 - RNA, 22 nt, synthetic construct
  source 1..22: mol_type = other RNA
tcagattagtggcacctgctga

SEQ ID NO: 28794 - RNA, 22 nt, synthetic construct
  source 1..22: mol_type = other RNA
tcagcagcttacaaaagaatgt

SEQ ID NO: 28795 - RNA, 22 nt, synthetic construct
  source 1..22: mol_type = other RNA
tcagcaggtgccactaatctga

SEQ ID NO: 28796 - RNA, 22 nt, synthetic construct
  source 1..22: mol_type = other RNA
tcagggaatgttcttaaagatc

SEQ ID NO: 28797 - RNA, 22 nt, synthetic construct
  source 1..22: mol_type = other RNA
tcagggtagtatggccatagac

SEQ ID NO: 28798 - RNA, 22 nt, synthetic construct
  source 1..22: mol_type = other RNA
tcaggtatatttagcactgaac

SEQ ID NO: 28799 - RNA, 22 nt, synthetic construct
  source 1..22: mol_type = other RNA
tcagtatctcagcaggtgccac

SEQ ID NO: 28800 - RNA, 22 nt, synthetic construct
  source 1..22: mol_type = other RNA
tcagtgctaaatatacctgaag

SEQ ID NO: 28801 - RNA, 22 nt, synthetic construct
  source 1..22: mol_type = other RNA
tcataaagctgctttgatataa

SEQ ID NO: 28802 - RNA, 22 nt, synthetic construct
  source 1..22: mol_type = other RNA
tcatacacaactttcagcagct

SEQ ID NO: 28803 - RNA, 22 nt, synthetic construct
  source 1..22: mol_type = other RNA
tcatatcataaagctgctttga

SEQ ID NO: 28804 - RNA, 22 nt, synthetic construct
  source 1..22: mol_type = other RNA
tcatgggtaggaacagcagcct

SEQ ID NO: 28805 - RNA, 22 nt, synthetic construct
  source 1..22: mol_type = other RNA
tcattcagggtagtatggccat

SEQ ID NO: 28806 - RNA, 22 nt, synthetic construct
  source 1..22: mol_type = other RNA
tccagccagaaagtactggaga

SEQ ID NO: 28807 - RNA, 22 nt, synthetic construct
  source 1..22: mol_type = other RNA
tccaggattataggatgctagg

SEQ ID NO: 28808 - RNA, 22 nt, synthetic construct
  source 1..22: mol_type = other RNA
tccagtactttctggctggatt

SEQ ID NO: 28809 - RNA, 22 nt, synthetic construct
  source 1..22: mol_type = other RNA
tcccaatatgcagattgtttat

SEQ ID NO: 28810 - RNA, 22 nt, synthetic construct
  source 1..22: mol_type = other RNA
tcccatcccatctgatataaac

SEQ ID NO: 28811 - RNA, 22 nt, synthetic construct
  source 1..22: mol_type = other RNA
tcccatctgatataaacaatct

SEQ ID NO: 28812 - RNA, 22 nt, synthetic construct
  source 1..22: mol_type = other RNA
tccctgacaatcccaatatgca

SEQ ID NO: 28813 - RNA, 22 nt, synthetic construct
  source 1..22: mol_type = other RNA
tccctgcagttgagcagggagc

SEQ ID NO: 28814 - RNA, 22 nt, synthetic construct
  source 1..22: mol_type = other RNA
tccctgctcaactgcagggaaa

SEQ ID NO: 28815 - RNA, 22 nt, synthetic construct
  source 1..22: mol_type = other RNA
tcctacccatgaatacattgtt

SEQ ID NO: 28816 - RNA, 22 nt, synthetic construct
  source 1..22: mol_type = other RNA
tcctactagcctcagataccaa

SEQ ID NO: 28817 - RNA, 22 nt, synthetic construct
  source 1..22: mol_type = other RNA
tcctagcatcctataatcctgg

SEQ ID NO: 28818 - RNA, 22 nt, synthetic construct
  source 1..22: mol_type = other RNA
tcctataatcctggacttctcc

SEQ ID NO: 28819 - RNA, 22 nt, synthetic construct
  source 1..22: mol_type = other RNA
tcctctagcttttgtggcagct

SEQ ID NO: 28820 - RNA, 22 nt, synthetic construct
  source 1..22: mol_type = other RNA
tcctgctgggtagctctaaaca

SEQ ID NO: 28821 - RNA, 22 nt, synthetic construct
  source 1..22: mol_type = other RNA
tcctgctgtcctagcatcctat

SEQ ID NO: 28822 - RNA, 22 nt, synthetic construct
  source 1..22: mol_type = other RNA
tcctggacttctccagtacttt

SEQ ID NO: 28823 - RNA, 22 nt, synthetic construct
  source 1..22: mol_type = other RNA
tcgttcagtgctaaatatacct

SEQ ID NO: 28824 - RNA, 22 nt, synthetic construct
  source 1..22: mol_type = other RNA
tctaaaatggttagaaataagg

SEQ ID NO: 28825 - RNA, 22 nt, synthetic construct
  source 1..22: mol_type = other RNA
tctaaacaatgtattcatgggt

SEQ ID NO: 28826 - RNA, 22 nt, synthetic construct
  source 1..22: mol_type = other RNA
tctaaccattttagacatttgt

SEQ ID NO: 28827 - RNA, 22 nt, synthetic construct
  source 1..22: mol_type = other RNA
tctagcttttgtggcagcttca

SEQ ID NO: 28828 - RNA, 22 nt, synthetic construct
  source 1..22: mol_type = other RNA
tctatggccatactaccctgaa

SEQ ID NO: 28829 - RNA, 22 nt, synthetic construct
  source 1..22: mol_type = other RNA
tctcaagaaggtataggccttt

SEQ ID NO: 28830 - RNA, 22 nt, synthetic construct
  source 1..22: mol_type = other RNA
tctcagcaggtgccactaatct

SEQ ID NO: 28831 - RNA, 22 nt, synthetic construct
  source 1..22: mol_type = other RNA
tctccagtactttctggctgga

SEQ ID NO: 28832 - RNA, 22 nt, synthetic construct
  source 1..22: mol_type = other RNA
tctgaaccagtagtttccctgc

SEQ ID NO: 28833 - RNA, 22 nt, synthetic construct
  source 1..22: mol_type = other RNA
tctgaggctagtaggaagggct

SEQ ID NO: 28834 - RNA, 22 nt, synthetic construct
  source 1..22: mol_type = other RNA
tctgatataaacaatctgcata

SEQ ID NO: 28835 - RNA, 22 nt, synthetic construct
  source 1..22: mol_type = other RNA
tctgatctttaagaacattccc

SEQ ID NO: 28836 - RNA, 22 nt, synthetic construct
  source 1..22: mol_type = other RNA
tctgcatattgggattgtcagg

SEQ ID NO: 28837 - RNA, 22 nt, synthetic construct
  source 1..22: mol_type = other RNA
tctgccagccttatttctaacc

SEQ ID NO: 28838 - RNA, 22 nt, synthetic construct
  source 1..22: mol_type = other RNA
tctggctggattggtatctgag

SEQ ID NO: 28839 - RNA, 22 nt, synthetic construct
  source 1..22: mol_type = other RNA
tcttaaagatcagattagtggc

SEQ ID NO: 28840 - RNA, 22 nt, synthetic construct
  source 1..22: mol_type = other RNA
tcttaacacttcttacctactg

SEQ ID NO: 28841 - RNA, 22 nt, synthetic construct
  source 1..22: mol_type = other RNA
tcttacattcttttgtaagctg

SEQ ID NO: 28842 - RNA, 22 nt, synthetic construct
  source 1..22: mol_type = other RNA
tcttacctactggcttcctcta

SEQ ID NO: 28843 - RNA, 22 nt, synthetic construct
  source 1..22: mol_type = other RNA
tcttgagatgttcgttcagtgc

SEQ ID NO: 28844 - RNA, 22 nt, synthetic construct
  source 1..22: mol_type = other RNA
tctttaagaacattccctgaca

SEQ ID NO: 28845 - RNA, 22 nt, synthetic construct
  source 1..22: mol_type = other RNA
tcttttgtaagctgctgaaagt

SEQ ID NO: 28846 - RNA, 22 nt, synthetic construct
  source 1..22: mol_type = other RNA
tgaaaaagacagtggagaaaaa

SEQ ID NO: 28847 - RNA, 22 nt, synthetic construct
  source 1..22: mol_type = other RNA
tgaaagttgtgtatgagtagtc

SEQ ID NO: 28848 - RNA, 22 nt, synthetic construct
  source 1..22: mol_type = other RNA
tgaaccagtagtttccctgcag

SEQ ID NO: 28849 - RNA, 22 nt, synthetic construct
  source 1..22: mol_type = other RNA
tgaacgaacatctcaagaaggt

SEQ ID NO: 28850 - RNA, 22 nt, synthetic construct
  source 1..22: mol_type = other RNA
tgaagctgccacaaaagctaga

SEQ ID NO: 28851 - RNA, 22 nt, synthetic construct
  source 1..22: mol_type = other RNA
tgaatacattgtttagagctac

SEQ ID NO: 28852 - RNA, 22 nt, synthetic construct
  source 1..22: mol_type = other RNA
tgaatgagtcccatcccatctg

SEQ ID NO: 28853 - RNA, 22 nt, synthetic construct
  source 1..22: mol_type = other RNA
tgacaatcccaatatgcagatt

SEQ ID NO: 28854 - RNA, 22 nt, synthetic construct
  source 1..22: mol_type = other RNA
tgactactcatacacaactttc

SEQ ID NO: 28855 - RNA, 22 nt, synthetic construct
  source 1..22: mol_type = other RNA
tgagatactgatgcacagcatg

SEQ ID NO: 28856 - RNA, 22 nt, synthetic construct
  source 1..22: mol_type = other RNA
tgagatgttcgttcagtgctaa

SEQ ID NO: 28857 - RNA, 22 nt, synthetic construct
  source 1..22: mol_type = other RNA
tgagcagggagcagcagcagca

SEQ ID NO: 28858 - RNA, 22 nt, synthetic construct
  source 1..22: mol_type = other RNA
tgaggctagtaggaagggcttg

SEQ ID NO: 28859 - RNA, 22 nt, synthetic construct
  source 1..22: mol_type = other RNA
tgagtagtcatatcataaagct

SEQ ID NO: 28860 - RNA, 22 nt, synthetic construct
  source 1..22: mol_type = other RNA
tgagtcccatcccatctgatat

SEQ ID NO: 28861 - RNA, 22 nt, synthetic construct
  source 1..22: mol_type = other RNA
tgatataaaaaaggtctatggc

SEQ ID NO: 28862 - RNA, 22 nt, synthetic construct
  source 1..22: mol_type = other RNA
tgatatgactactcatacacaa

SEQ ID NO: 28863 - RNA, 22 nt, synthetic construct
  source 1..22: mol_type = other RNA
tgatctttaagaacattccctg

SEQ ID NO: 28864 - RNA, 22 nt, synthetic construct
  source 1..22: mol_type = other RNA
tgatgcacagcatggtttctga

SEQ ID NO: 28865 - RNA, 22 nt, synthetic construct
  source 1..22: mol_type = other RNA
tgcaagtgctgctgctgctccc

SEQ ID NO: 28866 - RNA, 22 nt, synthetic construct
  source 1..22: mol_type = other RNA
tgcacaaatacatatacactct

SEQ ID NO: 28867 - RNA, 22 nt, synthetic construct
  source 1..22: mol_type = other RNA
tgcacagcatggtttctgaacc

SEQ ID NO: 28868 - RNA, 22 nt, synthetic construct
  source 1..22: mol_type = other RNA
tgcagattgtttatatcagatg

SEQ ID NO: 28869 - RNA, 22 nt, synthetic construct
  source 1..22: mol_type = other RNA
tgcagggaaactactggttcag

SEQ ID NO: 28870 - RNA, 22 nt, synthetic construct
  source 1..22: mol_type = other RNA
tgcagttgagcagggagcagca

SEQ ID NO: 28871 - RNA, 22 nt, synthetic construct
  source 1..22: mol_type = other RNA
tgcatattgggattgtcaggga

SEQ ID NO: 28872 - RNA, 22 nt, synthetic construct
  source 1..22: mol_type = other RNA
tgcatcagtatctcagcaggtg

SEQ ID NO: 28873 - RNA, 22 nt, synthetic construct
  source 1..22: mol_type = other RNA
tgccacaaaagctagaggaagc

SEQ ID NO: 28874 - RNA, 22 nt, synthetic construct
  source 1..22: mol_type = other RNA
tgccactaatctgatctttaag

SEQ ID NO: 28875 - RNA, 22 nt, synthetic construct
  source 1..22: mol_type = other RNA
tgccagccttatttctaaccat

SEQ ID NO: 28876 - RNA, 22 nt, synthetic construct
  source 1..22: mol_type = other RNA
tgctaaatatacctgaagctgc

SEQ ID NO: 28877 - RNA, 22 nt, synthetic construct
  source 1..22: mol_type = other RNA
tgctaggacagcaggacttaca

SEQ ID NO: 28878 - RNA, 22 nt, synthetic construct
  source 1..22: mol_type = other RNA
tgctcaactgcagggaaactac

SEQ ID NO: 28879 - RNA, 22 nt, synthetic construct
  source 1..22: mol_type = other RNA
tgctccctgctcaactgcaggg

SEQ ID NO: 28880 - RNA, 22 nt, synthetic construct
  source 1..22: mol_type = other RNA
tgctgaaagttgtgtatgagta

SEQ ID NO: 28881 - RNA, 22 nt, synthetic construct
  source 1..22: mol_type = other RNA
tgctgagatactgatgcacagc

SEQ ID NO: 28882 - RNA, 22 nt, synthetic construct
  source 1..22: mol_type = other RNA
tgctgctccctgctcaactgca

SEQ ID NO: 28883 - RNA, 22 nt, synthetic construct
  source 1..22: mol_type = other RNA
tgctgctgctccctgctcaact

SEQ ID NO: 28884 - RNA, 22 nt, synthetic construct
  source 1..22: mol_type = other RNA
tgctgctgctgctccctgctca

SEQ ID NO: 28885 - RNA, 22 nt, synthetic construct
  source 1..22: mol_type = other RNA
tgctgggtagctctaaacaatg

SEQ ID NO: 28886 - RNA, 22 nt, synthetic construct
  source 1..22: mol_type = other RNA
tgctgtcctagcatcctataat

SEQ ID NO: 28887 - RNA, 22 nt, synthetic construct
  source 1..22: mol_type = other RNA
tgctgtgcatcagtatctcagc

SEQ ID NO: 28888 - RNA, 22 nt, synthetic construct
  source 1..22: mol_type = other RNA
tgctgttcctacccatgaatac

SEQ ID NO: 28889 - RNA, 22 nt, synthetic construct
  source 1..22: mol_type = other RNA
tgctttgatataaaaaaggtct

SEQ ID NO: 28890 - RNA, 22 nt, synthetic construct
  source 1..22: mol_type = other RNA
tggacttctccagtactttctg

SEQ ID NO: 28891 - RNA, 22 nt, synthetic construct
  source 1..22: mol_type = other RNA
tggagaagtccaggattatagg

SEQ ID NO: 28892 - RNA, 22 nt, synthetic construct
  source 1..22: mol_type = other RNA
tggattggtatctgaggctagt

SEQ ID NO: 28893 - RNA, 22 nt, synthetic construct
  source 1..22: mol_type = other RNA
tggcacctgctgagatactgat

SEQ ID NO: 28894 - RNA, 22 nt, synthetic construct
  source 1..22: mol_type = other RNA
tggcagaataggctgctgttcc

SEQ ID NO: 28895 - RNA, 22 nt, synthetic construct
  source 1..22: mol_type = other RNA
tggcagcttcaggtatatttag

SEQ ID NO: 28896 - RNA, 22 nt, synthetic construct
  source 1..22: mol_type = other RNA
tggccatactaccctgaatgag

SEQ ID NO: 28897 - RNA, 22 nt, synthetic construct
  source 1..22: mol_type = other RNA
tggccatagaccttttttatat

SEQ ID NO: 28898 - RNA, 22 nt, synthetic construct
  source 1..22: mol_type = other RNA
tggctggattggtatctgaggc

SEQ ID NO: 28899 - RNA, 22 nt, synthetic construct
  source 1..22: mol_type = other RNA
tggcttcctctagcttttgtgg

SEQ ID NO: 28900 - RNA, 22 nt, synthetic construct
  source 1..22: mol_type = other RNA
tgggactcattcagggtagtat

SEQ ID NO: 28901 - RNA, 22 nt, synthetic construct
  source 1..22: mol_type = other RNA
tgggatgggactcattcagggt

SEQ ID NO: 28902 - RNA, 22 nt, synthetic construct
  source 1..22: mol_type = other RNA
tgggattgtcagggaatgttct

SEQ ID NO: 28903 - RNA, 22 nt, synthetic construct
  source 1..22: mol_type = other RNA
tgggtagctctaaacaatgtat

SEQ ID NO: 28904 - RNA, 22 nt, synthetic construct
  source 1..22: mol_type = other RNA
tgggtaggaacagcagcctatt

SEQ ID NO: 28905 - RNA, 22 nt, synthetic construct
  source 1..22: mol_type = other RNA
tggtatctgaggctagtaggaa

SEQ ID NO: 28906 - RNA, 22 nt, synthetic construct
  source 1..22: mol_type = other RNA
tggttagaaataaggctggcag

SEQ ID NO: 28907 - RNA, 22 nt, synthetic construct
  source 1..22: mol_type = other RNA
tggttcagaaaccatgctgtgc

SEQ ID NO: 28908 - RNA, 22 nt, synthetic construct
  source 1..22: mol_type = other RNA
tggtttctgaaccagtagtttc

SEQ ID NO: 28909 - RNA, 22 nt, synthetic construct
  source 1..22: mol_type = other RNA
tgtaagctgctgaaagttgtgt

SEQ ID NO: 28910 - RNA, 22 nt, synthetic construct
  source 1..22: mol_type = other RNA
tgtaagtcctgctgtcctagca

SEQ ID NO: 28911 - RNA, 22 nt, synthetic construct
  source 1..22: mol_type = other RNA
tgtatatgtatttgtgcaagtg

SEQ ID NO: 28912 - RNA, 22 nt, synthetic construct
  source 1..22: mol_type = other RNA
tgtatgagtagtcatatcataa

SEQ ID NO: 28913 - RNA, 22 nt, synthetic construct
  source 1..22: mol_type = other RNA
tgtattcatgggtaggaacagc

SEQ ID NO: 28914 - RNA, 22 nt, synthetic construct
  source 1..22: mol_type = other RNA
tgtatttgtgcaagtgctgctg

SEQ ID NO: 28915 - RNA, 22 nt, synthetic construct
  source 1..22: mol_type = other RNA
tgtcagggaatgttcttaaaga

SEQ ID NO: 28916 - RNA, 22 nt, synthetic construct
  source 1..22: mol_type = other RNA
tgtcctagcatcctataatcct

SEQ ID NO: 28917 - RNA, 22 nt, synthetic construct
  source 1..22: mol_type = other RNA
tgtgcaagtgctgctgctgctc

SEQ ID NO: 28918 - RNA, 22 nt, synthetic construct
  source 1..22: mol_type = other RNA
tgtgcatcagtatctcagcagg

SEQ ID NO: 28919 - RNA, 22 nt, synthetic construct
  source 1..22: mol_type = other RNA
tgtggcagcttcaggtatattt

SEQ ID NO: 28920 - RNA, 22 nt, synthetic construct
  source 1..22: mol_type = other RNA
tgtgtatgagtagtcatatcat

SEQ ID NO: 28921 - RNA, 22 nt, synthetic construct
  source 1..22: mol_type = other RNA
tgttcctacccatgaatacatt

SEQ ID NO: 28922 - RNA, 22 nt, synthetic construct
  source 1..22: mol_type = other RNA
tgttcctgctgggtagctctaa

SEQ ID NO: 28923 - RNA, 22 nt, synthetic construct
  source 1..22: mol_type = other RNA
tgttcgttcagtgctaaatata

SEQ ID NO: 28924 - RNA, 22 nt, synthetic construct
  source 1..22: mol_type = other RNA
tgttcttaaagatcagattagt

SEQ ID NO: 28925 - RNA, 22 nt, synthetic construct
  source 1..22: mol_type = other RNA
tgtttagagctacccagcagga

SEQ ID NO: 28926 - RNA, 22 nt, synthetic construct
  source 1..22: mol_type = other RNA
tgtttatatcagatgggatggg

SEQ ID NO: 28927 - RNA, 22 nt, synthetic construct
  source 1..22: mol_type = other RNA
tgtttgtaagtcctgctgtcct

SEQ ID NO: 28928 - RNA, 22 nt, synthetic construct
  source 1..22: mol_type = other RNA
ttaaagatcagattagtggcac

SEQ ID NO: 28929 - RNA, 22 nt, synthetic construct
  source 1..22: mol_type = other RNA
ttaacacttcttacctactggc

SEQ ID NO: 28930 - RNA, 22 nt, synthetic construct
  source 1..22: mol_type = other RNA
ttaagaacattccctgacaatc

SEQ ID NO: 28931 - RNA, 22 nt, synthetic construct
  source 1..22: mol_type = other RNA
ttacaaacaaaggcctatacct

SEQ ID NO: 28932 - RNA, 22 nt, synthetic construct
  source 1..22: mol_type = other RNA
ttacattcttttgtaagctgct

SEQ ID NO: 28933 - RNA, 22 nt, synthetic construct
  source 1..22: mol_type = other RNA
ttacctactggcttcctctagc

SEQ ID NO: 28934 - RNA, 22 nt, synthetic construct
  source 1..22: mol_type = other RNA
ttagaaataaggctggcagaat

SEQ ID NO: 28935 - RNA, 22 nt, synthetic construct
  source 1..22: mol_type = other RNA
ttagacatttgttagtacatgg

SEQ ID NO: 28936 - RNA, 22 nt, synthetic construct
  source 1..22: mol_type = other RNA
ttagagctacccagcaggaaca

SEQ ID NO: 28937 - RNA, 22 nt, synthetic construct
  source 1..22: mol_type = other RNA
ttagcactgaacgaacatctca

SEQ ID NO: 28938 - RNA, 22 nt, synthetic construct
  source 1..22: mol_type = other RNA
ttagtggcacctgctgagatac

SEQ ID NO: 28939 - RNA, 22 nt, synthetic construct
  source 1..22: mol_type = other RNA
ttataggatgctaggacagcag

SEQ ID NO: 28940 - RNA, 22 nt, synthetic construct
  source 1..22: mol_type = other RNA
ttatatcaaagcagctttatga

SEQ ID NO: 28941 - RNA, 22 nt, synthetic construct
  source 1..22: mol_type = other RNA
ttatatcagatgggatgggact

SEQ ID NO: 28942 - RNA, 22 nt, synthetic construct
  source 1..22: mol_type = other RNA
ttatgatatgactactcataca

SEQ ID NO: 28943 - RNA, 22 nt, synthetic construct
  source 1..22: mol_type = other RNA
ttcagaaaccatgctgtgcatc

SEQ ID NO: 28944 - RNA, 22 nt, synthetic construct
  source 1..22: mol_type = other RNA
ttcagcagcttacaaaagaatg

SEQ ID NO: 28945 - RNA, 22 nt, synthetic construct
  source 1..22: mol_type = other RNA
ttcagggtagtatggccataga

SEQ ID NO: 28946 - RNA, 22 nt, synthetic construct
  source 1..22: mol_type = other RNA
ttcaggtatatttagcactgaa

SEQ ID NO: 28947 - RNA, 22 nt, synthetic construct
  source 1..22: mol_type = other RNA
ttcagtgctaaatatacctgaa

SEQ ID NO: 28948 - RNA, 22 nt, synthetic construct
  source 1..22: mol_type = other RNA
ttcatgggtaggaacagcagcc

SEQ ID NO: 28949 - RNA, 22 nt, synthetic construct
  source 1..22: mol_type = other RNA
ttccctgacaatcccaatatgc

SEQ ID NO: 28950 - RNA, 22 nt, synthetic construct
  source 1..22: mol_type = other RNA
ttccctgcagttgagcagggag

SEQ ID NO: 28951 - RNA, 22 nt, synthetic construct
  source 1..22: mol_type = other RNA
ttcctacccatgaatacattgt

SEQ ID NO: 28952 - RNA, 22 nt, synthetic construct
  source 1..22: mol_type = other RNA
ttcctactagcctcagatacca

SEQ ID NO: 28953 - RNA, 22 nt, synthetic construct
  source 1..22: mol_type = other RNA
ttcctctagcttttgtggcagc

SEQ ID NO: 28954 - RNA, 22 nt, synthetic construct
  source 1..22: mol_type = other RNA
ttcctgctgggtagctctaaac

SEQ ID NO: 28955 - RNA, 22 nt, synthetic construct
  source 1..22: mol_type = other RNA
ttcgttcagtgctaaatatacc

SEQ ID NO: 28956 - RNA, 22 nt, synthetic construct
  source 1..22: mol_type = other RNA
ttctaaccattttagacatttg

SEQ ID NO: 28957 - RNA, 22 nt, synthetic construct
  source 1..22: mol_type = other RNA
ttctccagtactttctggctgg

SEQ ID NO: 28958 - RNA, 22 nt, synthetic construct
  source 1..22: mol_type = other RNA
ttctgaaccagtagtttccctg

SEQ ID NO: 28959 - RNA, 22 nt, synthetic construct
  source 1..22: mol_type = other RNA
ttctgccagccttatttctaac

SEQ ID NO: 28960 - RNA, 22 nt, synthetic construct
  source 1..22: mol_type = other RNA
ttctggctggattggtatctga

SEQ ID NO: 28961 - RNA, 22 nt, synthetic construct
  source 1..22: mol_type = other RNA
ttcttaaagatcagattagtgg

SEQ ID NO: 28962 - RNA, 22 nt, synthetic construct
  source 1..22: mol_type = other RNA
ttcttacctactggcttcctct

SEQ ID NO: 28963 - RNA, 22 nt, synthetic construct
  source 1..22: mol_type = other RNA
ttcttgagatgttcgttcagtg

SEQ ID NO: 28964 - RNA, 22 nt, synthetic construct
  source 1..22: mol_type = other RNA
ttcttttgtaagctgctgaaag

SEQ ID NO: 28965 - RNA, 22 nt, synthetic construct
  source 1..22: mol_type = other RNA
ttgagatgttcgttcagtgcta

SEQ ID NO: 28966 - RNA, 22 nt, synthetic construct
  source 1..22: mol_type = other RNA
ttgagcagggagcagcagcagc

SEQ ID NO: 28967 - RNA, 22 nt, synthetic construct
  source 1..22: mol_type = other RNA
ttgatataaaaaaggtctatgg

SEQ ID NO: 28968 - RNA, 22 nt, synthetic construct
  source 1..22: mol_type = other RNA
ttgcacaaatacatatacactc

SEQ ID NO: 28969 - RNA, 22 nt, synthetic construct
  source 1..22: mol_type = other RNA
ttgggattgtcagggaatgttc

SEQ ID NO: 28970 - RNA, 22 nt, synthetic construct
  source 1..22: mol_type = other RNA
ttggtatctgaggctagtagga

SEQ ID NO: 28971 - RNA, 22 nt, synthetic construct
  source 1..22: mol_type = other RNA
ttgtaagctgctgaaagttgtg

SEQ ID NO: 28972 - RNA, 22 nt, synthetic construct
  source 1..22: mol_type = other RNA
ttgtaagtcctgctgtcctagc

SEQ ID NO: 28973 - RNA, 22 nt, synthetic construct
  source 1..22: mol_type = other RNA
ttgtcagggaatgttcttaaag

SEQ ID NO: 28974 - RNA, 22 nt, synthetic construct
  source 1..22: mol_type = other RNA
ttgtgcaagtgctgctgctgct

SEQ ID NO: 28975 - RNA, 22 nt, synthetic construct
  source 1..22: mol_type = other RNA
ttgtggcagcttcaggtatatt

SEQ ID NO: 28976 - RNA, 22 nt, synthetic construct
  source 1..22: mol_type = other RNA
ttgtgtatgagtagtcatatca

SEQ ID NO: 28977 - RNA, 22 nt, synthetic construct
  source 1..22: mol_type = other RNA
ttgttcctgctgggtagctcta

SEQ ID NO: 28978 - RNA, 22 nt, synthetic construct
  source 1..22: mol_type = other RNA
ttgtttagagctacccagcagg

SEQ ID NO: 28979 - RNA, 22 nt, synthetic construct
  source 1..22: mol_type = other RNA
ttgtttatatcagatgggatgg

SEQ ID NO: 28980 - RNA, 22 nt, synthetic construct
  source 1..22: mol_type = other RNA
ttgtttgtaagtcctgctgtcc

SEQ ID NO: 28981 - RNA, 22 nt, synthetic construct
  source 1..22: mol_type = other RNA
tttaagaacattccctgacaat

SEQ ID NO: 28982 - RNA, 22 nt, synthetic construct
  source 1..22: mol_type = other RNA
tttagacatttgttagtacatg

SEQ ID NO: 28983 - RNA, 22 nt, synthetic construct
  source 1..22: mol_type = other RNA
tttagagctacccagcaggaac

SEQ ID NO: 28984 - RNA, 22 nt, synthetic construct
  source 1..22: mol_type = other RNA
tttagcactgaacgaacatctc

SEQ ID NO: 28985 - RNA, 22 nt, synthetic construct
  source 1..22: mol_type = other RNA
tttatatcaaagcagctttatg

SEQ ID NO: 28986 - RNA, 22 nt, synthetic construct
  source 1..22: mol_type = other RNA
tttatatcagatgggatgggac

SEQ ID NO: 28987 - RNA, 22 nt, synthetic construct
  source 1..22: mol_type = other RNA
tttatgatatgactactcatac

SEQ ID NO: 28988 - RNA, 22 nt, synthetic construct
  source 1..22: mol_type = other RNA
tttcagcagcttacaaaagaat

SEQ ID NO: 28989 - RNA, 22 nt, synthetic construct
  source 1..22: mol_type = other RNA
tttccctgcagttgagcaggga

SEQ ID NO: 28990 - RNA, 22 nt, synthetic construct
  source 1..22: mol_type = other RNA
tttctgaaccagtagtttccct

SEQ ID NO: 28991 - RNA, 22 nt, synthetic construct
  source 1..22: mol_type = other RNA
tttctggctggattggtatctg

SEQ ID NO: 28992 - RNA, 22 nt, synthetic construct
  source 1..22: mol_type = other RNA
tttgtaagctgctgaaagttgt

SEQ ID NO: 28993 - RNA, 22 nt, synthetic construct
  source 1..22: mol_type = other RNA
tttgtaagtcctgctgtcctag

SEQ ID NO: 28994 - RNA, 22 nt, synthetic construct
  source 1..22: mol_type = other RNA
tttgtgcaagtgctgctgctgc

SEQ ID NO: 28995 - RNA, 22 nt, synthetic construct
  source 1..22: mol_type = other RNA
tttgtggcagcttcaggtatat

SEQ ID NO: 28996 - RNA, 22 nt, synthetic construct
  source 1..22: mol_type = other RNA
tttgtttgtaagtcctgctgtc

SEQ ID NO: 28997 - RNA, 22 nt, synthetic construct
  source 1..22: mol_type = other RNA
ttttgtaagctgctgaaagttg

SEQ ID NO: 28998 - RNA, 22 nt, synthetic construct
  source 1..22: mol_type = other RNA
ttttgtggcagcttcaggtata

SEQ ID NO: 28999 - RNA, 20 nt, synthetic construct
  source 1..20: mol_type = other RNA
aaaaaaatgtacttggttcc

SEQ ID NO: 29000 - RNA, 17 nt, synthetic construct
  source 1..17: mol_type = other RNA
aaaatgtacttggttcc

SEQ ID NO: 29001 - RNA, 17 nt, synthetic construct
  source 1..17: mol_type = other RNA
aaaaatgtacttggttc

SEQ ID NO: 29002 - RNA, 17 nt, synthetic construct
  source 1..17: mol_type = other RNA
aaaaaatgtacttggtt

SEQ ID NO: 29003 - RNA, 17 nt, synthetic construct
  source 1..17: mol_type = other RNA
aaaaaaatgtacttggt

SEQ ID NO: 29004 - protein, 1370 aa, synthetic construct
MTKVKDYYIGLDIGTSSVGWAVTDEAYNVLKFNSKKMWGVRLFDDAKTAEERRGQRGARRRLDRKKERLSLLQDFFAEEVAKVDPNFFLRLDNSDLYMEDKDQKLKSKYTLFNDKDFKDKNFHKKYPTIHHLLMDLIEDDSKKDIRLVYLACHYLLKNRGHFIFEGQKFDTKSSFENSLNELKVHLNDEYGLDLEFDNENLINILTDPKLNKTAKKKELKSVIGDTKFLKAVSAIMIGSSQKLVDLFENPEDFDDSAIKSVDFSTTSFDDKYSDYELALGDKIALVNILKEIYDSSILENLLKEADKSKDGNKYISNAFVKKYNKHGQDLKEFKRLVRQYHKSAYFDIFRSEKVNDNYVSYTKSSISNNKRVKANKFTDQEAFYKFAKKHLETIKYKINKVNGSKADLELIDGMLRDMEFKNFMPKIKSSDNGVIPYQLKLMELNKILENQSKHHEFLNVSDEYGSVCDKIASIMEFRIPYYVGPLNPNSKYAWIKKQKDSEITPWNFKDVVDLDSSREEFIDSLIGRCTYLKDEKVLPKASLLYNEYMVLNELNNLKLNDLPITEEMKKKIFDQLFKTRKKVTLKAVANLLKKEFNINGEILLSGTDGDFKQGLNSYNDFKAIVGDKVDSDDYRDKIEEIIKLIVLYGDDKSYLQKKIKAGYGKYFTDSEIKKMAGLNYKDWGRLSKKLLTGLEGANKITGERGSIIHFMREYNLNLMELMSASFTFTEEIQKLNPVDDRKLSYEMVDELYLSPSVKRMLWQSLRIVDEIKNIMGTDSKKIFIEMARGKEEVKARKESRKNQLLKFYKDGKKAFISEIGEERYSYLLSEIEGEEENKFRWDNLYLYYTQLGRCMYSLEPIDISELSSKNIYDQDHIYPKSKIYDDSIENRVLVKKDLNSKKGNSYPIPDEILNKNCYAYWKILYDKGLIGQKKYTRLTRRTGFTDDELVQFISRQIVETRQATKETANLLKTICKNSEIVYSKAENASRFRQEFDIVKCRAVNDLHHMHDAYINIIVGNVYNTKFTKDPMNFVKKQEKARSYNLENMFKYDVKRGGYTAWIADDEKGTVKNASIKRIRKELEGTNYRFTRMNYIESGALFNATLQRKNKGSRPLKDKGPKSSIEKYGGYTNINKACFAVLDIKSKNKIERKLMPVEREIYAKQKNDKKLSDEIFSKYLKDRFGIEDYRVVYPVVKMRTLLKIDGSYYFITGGSDKTLELRSALQLILPKKNEWAIKQIDKSSENDYLTIERIQDLTEELVYNTFDIIVNKFKTSVFKKSFLNLFQDDKIENIDFKFKSMDFKEKCKTLLMLVKAIRASGVRQDLKSIDLKSDYGRLSSKTNNIGNYQEFKIINQSITGLFENEVDLLKL

SEQ ID NO: 29005 - protein, 1370 aa, synthetic construct
MTKVKDYYIGLDIGTSSVGWAVTDEAYNVLKFNSKKMWGVRLFDDAKTAEERRGQRGARRRLDRKKERLSLLQDFFAEEVAKVDPNFFLRLDNSDLYMEDKDQKLKSKYTLFNDKDFKDKNFHKKYPTIHHLLMDLIEDDSKKDIRLVYLACHYLLKNRGHFIFEGQKFDTKSSFENSLNELKVHLNDEYGLDLEFDNENLINILTDPKLNKTAKKKELKSVIGDTKFLKAVSAIMIGSSQKLVDLFENPEDFDDSAIKSVDFSTTSFDDKYSDYELALGDKIALVNILKEIYDSSILEALLKEADKSKDGNKYISNAFVKKYNKHGQDLKEFKRLVRQYHKSAYFDIFRSEKVNDNYVSYTKSSISNNKRVKANKFTDQEAFYKFAKKHLETIKYKINKVNGSKADLELIDGMLRDMEFKNFMPKIKSSDNGVIPYQLKLMELNKILENQSKHHEFLNVSDEYGSVCDKIASIMEFRIPYYVGPLNPNSKYAWIKKQKDSEITPWNFKDVVDLDSSREEFIDSLIGRCTYLKDEKVLPKASLLYNEYMVLNELNNLKLNDLPITEEMKKKIFDQLFKTRKKVTLKAVANLLKKEFNINGEILLSGTDGDFKQRLNSYNDFKAIVGDKVDSDDYRDKIEEIIKLIVLYGDDKSYLQKKIKAGYGKYFTDSEIKKMAGLNYKDWGRLSKKLLTGLEGALKITGERGSIIHFMREYNLNLMELMSASFTFTEEIQKLNPVDDRKLSYEMVDELYLSPSVKRMLWQSLRIVDEIKNIMGTDSKKIFIEMARGKEEVKARKESRKNQLLKFYKDGKKAFISEIGEERYSYLLSEIEGEEFNKFRWDNLYLYYTQLGRCMYSLEPIDISELSSKNIYDQDHIYPKSKIYDDSIENRVLVKKDLNSKKGNSYPIPDEILNKNCYAYWKILYDKGLIGQKKYTRLLRRTGFTDDELVQFISRQIVETRQATKETANLLKTICKNSEIVYSKAENASRFRQEFDIVKCRAVNDLHHMHDAYINIIVGNVYNTKFTKDPMNFVKKQEKARSYNLENMFKYDVKRGGYTAWIADDEKGTVKNASIKRIRKELEGTNYRFTRMNYIESGAFFNATLQRKNKGSRPLKDKGPKSSIEKYGGYTNINKACFAVLDIKSKNKIERKLMPVEREIYAKQKNDKKLSDEIFSKYLKDRFGIEDYRVVYPVVKMRTLLKIDGSYYFITGGSDKTLELRSALQLILPKKNEWAIKQIDKSSENDYLTIERIQDLTEELVYNTFDIIVNKFKTSVFKKSFLNLFQDDKIENIDFKFKSMDFKEKCKTLLMLVKAIRASGVRQDLKSIDLKSDYGRLSSKTNNIGNYQEFKIINQSITGLFENEVDLLKL

SEQ ID NO: 29006 - RNA, 80 nt, synthetic construct
  source 1..80: mol_type = other RNA
gtttgagagttatgaaaatgacgagttcaaataaaaatttattcaaaccgcctatttataggccgcagatgttctgcttt

SEQ ID NO: 29007 - DNA, 32 bp, synthetic construct
  source 1..32: mol_type = other DNA
tactgacatccactttgcctttctctccacag

SEQ ID NO: 29008 - DNA, 714 bp, synthetic construct
  source 1..714: mol_type = other DNA
gtgagcaagggcgaggagctgttcaccggggtggtgcccatcctggtcgagctggacggcgacgtaaacggccacaagttcagcgtgtccggcgagggcgagggcgatgccacctacggcaagctgaccctgaagttcatctgcaccaccggcaagctgcccgtgccctggcccaccctcgtgaccaccctgacctacggcgtgcagtgcttcagccgctaccccgaccacatgaagcagcacgacttcttcaagtccgccatgcccgaaggctacgtccaggagcgcaccatcttcttcaaggacgacggcaactacaagacccgcgccgaggtgaagttcgagggcgacaccctggtgaaccgcatcgagctgaagggcatcgacttcaaggaggacggcaacatcctggggcacaagctggagtacaactacaacagccacaacgtctatatcatggccgacaagcagaagaacggcatcaaggtgaacttcaagatccgccacaacatcgaggacggcagcgtgcagctcgccgaccactaccagcagaacacccccatcggcgacggccccgtgctgctgcccgacaaccactacctgagcacccagtccgccctgagcaaagaccccaacgagaagcgcgatcacatggtcctgctggagttcgtgaccgccgccgggatcactctcggcatggacgagctgtacaag

SEQ ID NO: 29009 - DNA, 156 bp, synthetic construct
  source 1..156: mol_type = other DNA
tcctacccatacgatgttccagattacgcggccgctgccaccaacttcagcctgctgaagcaggccggcgacgtggaggagaaccccggccccggaagcggagagggcagaggaagtctgctaacatgcggtgacgtcgaggagaatcctggacct

SEQ ID NO: 29010 - DNA, 63 bp, synthetic construct
  source 1..63: mol_type = other DNA
atgatttctccagtgctcatcttgttctcgagttttctctgccatgttgctattgcaggacgg

SEQ ID NO: 29011 - DNA, 47 bp, synthetic construct
  source 1..47: mol_type = other DNA
gtaagttcaaggttacaagacaggtttaaggagaccaatagaaactg

SEQ ID NO: 29012 - DNA, 2615 bp, synthetic construct
  source 1..2615: mol_type = other DNA
tcaatgaaaaatatagagtttataatattttcttcccacttccccatggatggtctagtcatgcctctcattttggaaagtactgtttctgaaacattaggcaatatattcccaacctggctagtttacagcaatcacctgtggatgctaattaaaacgcaaatcccactgtcacatgcattactccatttgatcataatggaaagtatgttctgtcccatttgccatagtcctcacctatccctgttgtattttatcgggtccaactcaaccatttaaggtatttgccagctcttgtatgcatttaggttttgtttctttgttttttagctcatgaaattaggtacaaagtcagagaggggtctggcatataaaacctcagcagaaataaagaggttttgttgtttggtaagaacataccttgggttggttgggcacggtggctcgtgcctgtaatcccaacactttgggaggccaaggcaggctgatcacttgaagttgggagttcaagaccagcctggccaacatggtgaaatcccgtctctactgaaaatacaaaaattaaccaggcatggtggtgtgtgcctgtagtcccaggaatcacttgaacccaggaggcggaggttgcagtgagctgagatctcaccactgcacactgcactccagcctgggcaatggaatgagattccatcccaaaaaataaaaaaataaaaaaataaagaacataccttgggttgatccacttaggaacctcagataataacatctgccacgtatagagcaattgctatgtcccaggctactgacatccactttgcctttctctccacaggtgtgagcaagggcgaggagctgttcaccggggtggtgcccatcctggtcgagctggacggcgacgtaaacggccacaagttcagcgtgtccggcgagggcgagggcgatgccacctacggcaagctgaccctgaagttcatctgcaccaccggcaagctgcccgtgccctggcccaccctcgtgaccaccctgacctacggcgtgcagtgcttcagccgctaccccgaccacatgaagcagcacgacttcttcaagtccgccatgcccgaaggctacgtccaggagcgcaccatcttcttcaaggacgacggcaactacaagacccgcgccgaggtgaagttcgagggcgacaccctggtgaaccgcatcgagctgaagggcatcgacttcaaggaggacggcaacatcctggggcacaagctggagtacaactacaacagccacaacgtctatatcatggccgacaagcagaagaacggcatcaaggtgaacttcaagatccgccacaacatcgaggacggcagcgtgcagctcgccgaccactaccagcagaacacccccatcggcgacggccccgtgctgctgcccgacaaccactacctgagcacccagtccgccctgagcaaagaccccaacgagaagcgcgatcacatggtcctgctggagttcgtgaccgccgccgggatcactctcggcatggacgagctgtacaagtcctacccatacgatgttccagattacgcggccgctgccaccaacttcagcctgctgaagcaggccggcgacgtggaggagaaccccggccccggaagcggagagggcagaggaagtctgctaacatgcggtgacgtcgaggagaatcctggacctatgatttctccagtgctcatcttgttctcgagttttctctgccatgttgctattgcaggacggcgtaagttcaaggttacaagacaggtttaaggagaccaatagaaactgactctactagacacttcatacagtttagaaaatcagatgggtgtagatcaaggcaggagcaggaaccaaaaagaaaggcataaacataagaaaaaaaatggaaggggtggaaacagagtacaataacatgagtaatttgatgggggctattatgaactgagaaatgaactttgaaaagtatcttggggccaaatcatgtagactcttgagtgatgtgttaaggaatgctatgagtgctgagagggcatcagaagtccttgagagcctccagagaaaggctcttaaaaatgcagcgcaatctccagtgacagaagatactgctagaaatctgctagaaaaaaaacaaaaaaggcatgtatagaggaattatgagggaaagataccaagtcacggtttattcttcaaaatggaggtggcttgttgggaaggtggaagctcatttggccagagtggaaatggaattgggagaaatcgatgaccaaatgtaaacacttggtgcctgatatagcttgacaccaagttagccccaagtgaaataccctggcaatattaatgtgtcttttcccgatattcctcaggtactccaaagattcaggtttactcacgtcatccagcagagaatggaaagtcaaatttcctgaattgctatgtgtctgggtttcatccatccgacattgaagttgacttactgaagaatggagagagaattgaaaaagtggagcattcagacttgtctttcagcaaggactggtctttctatctcttgtactacactgaattcacccccactgaaaaagatg